(19) United States
(12) Patent Application Publication
(10) Pub. No.: US 2021/0214440 A1
(43) Pub. Date: Jul. 15, 2021

(54) MATERIALS AND METHODS FOR IN VIVO BIOLOGICAL TARGETING

(71) Applicant: Janssen Biotech, Inc., Horsham, PA (US)

(72) Inventors: Rajkumar Ganesan, Blue Bell, PA (US); Sanjaya Singh, Blue Bell, PA (US); Iqbal S. Grewal, Newtown, PA (US); Michael Riis Hansen, Broomall, PA (US)

(73) Assignee: Janssen Biotech, Inc., Horsham, PA (US)

(21) Appl. No.: 17/125,162

(22) Filed: Dec. 17, 2020

Related U.S. Application Data
(60) Provisional application No. 63/091,100, filed on Oct. 13, 2020.
(60) Provisional application No. 62/949,526, filed on Dec. 18, 2019.
(60) Provisional application No. 62/949,519, filed on Dec. 18, 2019.
(60) Provisional application No. 62/949,513, filed on Dec. 18, 2019.
(60) Provisional application No. 62/949,507, filed on Dec. 18, 2019.
(60) Provisional application No. 62/949,502, filed on Dec. 18, 2019.
(60) Provisional application No. 62/949,499, filed on Dec. 18, 2019.
(60) Provisional application No. 62/949,492, filed on Dec. 18, 2019.
(60) Provisional application No. 62/949,486, filed on Dec. 18, 2019.

(51) Int. Cl. C07K 16/28; B01D 15/00

(52) U.S. Cl. CPC C07K 16/2815; A61K 2039/507; B01D 15/00; C07K 16/2809

(57) ABSTRACT

An isolated molecule, comprising: a first antigen binding domain and a second antigen binding domain, wherein the first antigen binding domain specifically binds CD8 and the second antigen binding domain specifically binds a T cell receptor (TCR) complex.

### CROSS-REFERENCE TO RELATED APPLICATIONS

[0001] This application claims benefit of priority of U.S. Ser. No. 62/949,486 filed on Dec. 18, 2019, U.S. Ser. No. 62/949,492 filed on Dec. 18, 2019, U.S. Ser. No. 62/949,499 filed on Dec. 18, 2019, U.S. Ser. No. 62/949,502 filed on Dec. 18, 2019, U.S. Ser. No. 62/949,507 filed on Dec. 18, 2019, U.S. Ser. No. 62/949,513 filed on Dec. 18, 2019, U.S. Ser. No. 62/949,519 filed on Dec. 18, 2019, U.S. Ser. No. 62/949,526 filed on Dec. 18, 2019, and U.S. Ser. No. 63/091,100 filed on Oct. 13, 2020, the contents of each of which is incorporated herein by reference in its entirety.

### SEQUENCE LISTING

[0002] This application incorporates by reference a Sequence Listing submitted with this application as a text format, entitled “14620-329-999_SL.txt,” created on Dec. 15, 2020 and having a size of 1,037,532 bytes.

### TECHNICAL FIELD

[0003] Provided herein are molecules comprising multiple binding domains, compositions comprising same, and methods for uses thereof, e.g., for treating a disease or disorder such as cancer.

### BACKGROUND

[0004] T cell redirection has become an alternative to cancer therapies with the approval of BENLYSTA® (blinatumomab). T cell redirection utilizing CD3 binding domains however poses challenges as the approach results in unselective recruitment of pan-T cells, including exhausted T cells, helper and regulatory cells such as CD4⁺, Th1, Th2, Th9, Th17, Th22, Tfh, Tregs, Tr1 and non-CTL CD8⁺ cells, i.e., cells that are incapable of mediating tumor cell lysis. Only fraction of the cells recruited by engaging CD3 are cytotoxic T lymphocytes (CTLs). Further, even low doses of T cell redirection molecules based on CD3 may result in cytokine release syndrome. Therefore, there is a need to develop additional strategies to redirect subsets of T cells to enhance selectivity and safety profile of T cell redirecting molecules for improved treatment of cancers and other diseases in which depletion or partial depletion of cells contributing to disease pathogenesis is beneficial.

### SUMMARY

[0005] In one aspect, the disclosure provides an isolated molecule, comprising: a first antigen binding domain and a second antigen binding domain, wherein the first antigen binding domain specifically binds CD8 and the second antigen binding domain specifically binds a T cell receptor (TCR) complex.

[0006] In another aspect, the disclosure provides an isolated molecule, comprising: a first antigen binding domain, a second antigen binding domain and a third antigen binding domain, wherein the first antigen binding domain specifically binds CD8, the second antigen binding domain specifically binds a TCR complex, and the third antigen binding domain binds a third antigen.

[0007] In another aspect, the disclosure provides an isolated molecule, comprising: a first antigen binding domain, a second antigen binding domain and a third antigen binding domain, wherein the first antigen binding domain specifically binds CD8, the second antigen binding domain specifically binds a TCR complex, and the third antigen binding domain binds an antigen expressed by an undesired cell.

[0008] In some embodiments, the molecule further comprises a third antigen binding domain that specifically binds an third antigen. In some embodiments, the third antigen comprises an antigen expressed by undesired cells.

[0009] In some embodiments, the isolated molecule activates or recruits CD8+ CTLs upon co-engagement of the TCR complex and CD8. In some embodiments, the isolated molecule is unable to activate or recruit CD8+ CTLs in the absence of co-engagement of the TCR complex and CD8. In some embodiments, the first antigen binding domain specifically binds CD8 and the second antigen binding domain specifically binds the TCR complex with affinities that result in activation or recruitment of CD8+ CTLs only upon co-engagement of the TCR complex and CD8.

[0010] In some embodiments, the first antigen binding domain, the second antigen binding domain or the third antigen binding domain comprises a scFv, a Fab, a Fab′, a F(ab′)2, a Fd, a Fv, a domain antibody (dAb), a VHH, a heavy chain variable domain (VH), a light chain variable domain (VL), a non-antibody scaffold, or fragments thereof. In some embodiments, the first antigen binding domain comprises the Fab. In some embodiments, the second antigen binding domain comprises the scFv. In some embodiments, the third antigen binding domain comprises the scFv.

[0011] In some embodiments, the first antigen binding domain comprising the Fab, the second antigen binding domain comprising the scFv or the third antigen binding domain comprising the scFv is conjugated to the Fc or the fragment of the Fc, to the VH that is capable of specifically biding CD8, to the CL domain or to the CH3 domain via a linker. In some embodiments, the linker comprises a polypeptide of SEQ ID NOs: 2183-2290. In some embodiments, the fragment of the Fc comprises a CH2 domain and a CH3 domain. In some embodiments, the CH3 domain comprises one or more substitutions when compared to a wild-type CH3 domain. In some embodiments, the one or more substitutions comprise T350V, L351Y, F405A, Y407V, T366Y, T366W, F405W, T394W, T394S, Y407T, Y407A, T3665/L368A/Y407V, L351Y/F405A/Y407V, T366I/K392M/T394W, F405A/Y407V, T366L/K392M/T394W, L351Y/Y407A, T366A/K409F, L351Y/Y407A, T366V/K409F, T366A/K409F, T350V/L351Y/F405A/Y407V or T350V/T366L/K392L/T394W, wherein residue numbering is according to the EU index.

[0012] In yet another aspect, the disclosure also provides an isolated molecule, comprising: a first polypeptide, a second polypeptide and a third polypeptide, wherein the first polypeptide comprises, from N- to C-terminus, a second antigen binding domain comprising a scFv that specifically binds a TCR complex, a VH that is capable of specifically binding CD8, a CH1 domain, a hinge, a CH2 domain and a CH3 domain; the second polypeptide comprises, from N- to C-terminus, a VL that is capable of specifically binding CD8 and a CL domain; and the third polypeptide comprises, from N- to C-terminus, a third antigen binding domain comprising a scFv that specifically binds an antigen expressed by an undesired cell and a Fc or a fragment of the Fc.

[0013] In yet another aspect, the disclosure also provides an isolated molecule, comprising: a first polypeptide, a second polypeptide and a third polypeptide, wherein the first polypeptide comprises, from N- to C-terminus, a VH that is capable of specifically binding CD8, a CH1 domain, a hinge, a CH2 domain and a CH3 domain; the second polypeptide comprises, from N- to C-terminus, a VL that is capable of specifically binding CD8, a CL domain and a second antigen binding domain comprising a scFv that specifically binds a TCR complex; and the third polypeptide comprises, from N- to C-terminus, a third antigen binding domain comprising a scFv that specifically binds an antigen expressed by an undesired cell and a Fc or a fragment of the Fc.

[0014] In yet another aspect, the disclosure also provides an isolated molecule, comprising: a first polypeptide, a second polypeptide and a third polypeptide, wherein the first polypeptide comprises, from N- to C-terminus, a VH that is capable of specifically CD8, a CH1 domain, a hinge, a CH2 domain, a CH3 domain and a second antigen binding domain comprising a scFv that specifically binds a TCR complex; the second polypeptide comprises, from N- to C-terminus, a VL that is capable of specifically binding CD8 and a CL domain; and the third polypeptide comprises, from N- to C-terminus, a third antigen binding domain comprising a scFv that specifically binds an antigen expressed by an undesired cell and a Fc or a fragment of the Fc.

[0015] In some embodiments, the first polypeptide comprises a CH3 domain comprising one or more substitutions when compared to a wild-type CH3 domain which promote heterodimerization of the first polypeptide with the third polypeptide; the third polypeptide comprises a CH3 domain comprising one or more substitutions when compared to the wild-type CH3 domain which promote heterodimerization of the third polypeptide with the first polypeptide; or the first polypeptide comprises the CH3 domain comprising one or more substitutions when compared to the wild-type CH3 which promote heterodimerization of the first polypeptide with the third polypeptide and the third polypeptide comprises the CH3 domain comprising one or more substitutions when compared to the wild-type CH3 which promote heterodimerization of the third polypeptide with the first polypeptide.

[0016] In some embodiments, the one or more substitutions comprise T350V, L351Y, F405A, Y407V, T366Y, T366W, F405W, T394W, T394S, Y407T, Y407A, T366S/L368A/Y407V, L351Y/F405A/Y407V, T366I/K392M/T394W, F405A/Y407V, T366L/K392M/T394W, L351Y/Y407A, T366A/K409F, L351Y/Y407A, T366V/K409F, T366A/K409F, T350V/L351Y/F405A/Y407V or T350V/T366L/K392L/T394W, wherein residue numbering is according to the EU index.

[0017] In some embodiments, the Fc, the CH2 domain or the CH3 domain is an IgG1, IgG2, IgG3 or IgG4 isotype. In some embodiments, the second antigen binding domain specifically binds CD3, TCRα chain, TCRβ chain, TCRγ chain or TCRδ chain, or any combination thereof. In some embodiments, the TCRβ chain comprises TCRVB17. In some embodiments, CD3 comprises CD3ε, CD3γ, CD3δ or CD3ζ. In some embodiments, the second antigen binding domain that specifically binds CD3 comprises a heavy chain complementarity determining region 1 (HCDR1 of SEQ ID NO: 2291, a HCDR2 of SEQ ID NO: 2292, a HCDR3 of SEQ ID NO: 2293, a LCDR1 of SEQ ID NO: 2294, a LCDR2 of SEQ ID NO: 2295 and a LCDR3 of SEQ ID NO: 2296. In some embodiments, the second antigen binding domain that specifically binds CD3 comprises the VH of SEQ ID NO: 2297 and the VL of SEQ ID NO: 2298. In some embodiments, the first antigen binding domain comprises the HCDR1 of SEQ ID NO: 2307, the HCDR2 of SEQ ID NO: 2308, the HCDR3 of SEQ ID NO: 2309, the LCDR1 of SEQ ID NO: 2310, the LCDR2 of SEQ ID NO: 2311 and the LCDR3 of SEQ ID NO: 2312. In some embodiments, the first antigen binding domain comprises the VH of SEQ ID NO: 2313 and the VL of SEQ ID NO: 2314.

[0018] In some embodiments, the undesired cell is a pathogenic cell. In some embodiments, the undesired cell is a cancer cell, an infected cell, a virus infected cell, a bacterial infected cell, an immune cell, an inflamed cell, a damaged cells, a foreign cell, an apoptotic cell, a dysplastic cell, an immunogenic cell, a metaplastic cell or a mutant cell, or any combination thereof. In some embodiments, the isolated molecule is an antibody or a non-antibody molecule. In some embodiments, the antibody comprises a first half molecule and a second half molecule, wherein the first half molecule comprises the first antigen binding domain and the second antigen binding domain and the second half molecule comprises the third antigen binding domain.

[0019] In some embodiments, the antigen expressed by the undesired cell comprises mesothelin, alpha-fetoprotein (ALP), BAGE, BCR-ABL, beta-catenin, beta-HCG, BrE3-antigen, BCA225, BCMA, BTAA, CA125, CA195, CA242, CA-50, CAM43, CAMEL, CAP-1, carbonic anhydrase IX, CA19-9, CA72-4, CAM 17.1, CASP-8, CCCL19, CCCL21, CD1, CD 1a, CD2, CD4, CD5, CD11A, CD14, CD15, CD16, CD18, CD19, CD20, CD21, CD22, CD23, CD25, CD29, CD30, CD32b, CD33, CD37, CD38, CD40, CD40L, CD44, CD45, CD46, CD47, CD52, CD54, CD55, CD59, CD64, CD66a-e, CD67, CD68, CD70, CD70L, CD74, CD79a, CD79b, CD80, CD83, CD95, CD123, CD126, CD132, CD133, CD138, CD147, CD154, CDC27, CDK4, CDK4m, CDKN2A, CO-029, CTLA4, CXCR4, CXCR7, CXCL12, HIF-1a, colon-specific antigen-p (CSAp), CEACAM5) CEACAM6, c-Met, DAM, E2A-PRL, EGFR, EGFRvIII, EGP-1, EGP-2, ELF2-M, Ep-CAM, FGF, FGF-5, Flt-1, Flt-3, folate receptor, G250 antigen, Ga733VEpCAM, GAGE, gplOO, GRO-b, H4-RET, HLA-DR, HM1.24, human chorionic gonadotropin (HCG) HER2, HER3, HMGB-1, HIF-1, HSP70-2M, HST-2, HTgp-175, 1a, IGF-1R, IFN-g, IFN-α, IFN-b, IFN-1, IL-4R, IL-6R, IL-13R, IL-15R, IL-17R, IL-18R, IL-2, IL-6, IL-8, IL-12, IL-15, IL-17, IL-18, IL-23, IL-25, insulin-like growth factor-1 (IGF-1), KC4-antigen, KLK2, KSA, KS-1-antigen, KS1-4, LAGE-1a, Le-Y, LDR/FUT, M344, MA-50, macrophage migration inhibitory factor (MIF), MAGE, MAGE-1, MAGE-3, MAGE-4, MAGE-5, MAGE-6, MART-1, MART-2, TRAG-3, MCP-1, MIP-1A, MIP-1B, MIF, MG7-Ag, MOV18, MUC1, MUC2, MUC3, MUC4, MUC5ac, MUC13, MUC16, MUM-1/2, MUM-3, MYL-RAR, NB/70K, Nm23H1, NuMA, NCA66, NCA95, NCA90, NY-ESO-1, p15, p16, p185erbB2, p180erbB3, PAM4 antigen, pancreatic cancer mucin, PD-1, PD-L1, PD-L2, PI5, placental growth factor, p53, PLAGL2, Pmel17 prostatic acid phosphatase, PSA, PRAME, PSMA, PlGF, ILGF, ILGF-1R, IL-6, IL-25, RCAS1, RS5, RAGE, RANTES, Ras, T101, SAGE, S100, SLAMF7, survivin, survivin-2B, SDDCAG16, TA-90\Mac2 binding protein, TAAL6, TAC, TAG-72, TLP, tenascin, TMEFF2, TRAIL receptors, TRP-1, TRP-2, TSP-180, VEGFR, ED-B fibronectin, WT-1, 17-1A-antigen, C3, C3a, C3b, C5a, C5, bcl-2, K-ras, tumor neoantigen, a viral antigen associated with cancer, FcγRIIB, IL-12β2R, CD28, CD56, CD11c, CD66b, CD41, CD61, CD62, CD235a, CD146, CD326, or CD203c.

[0020] In yet another aspect, provided herein is a kit, comprising the isolated molecule provided herein. In some embodiments, the kit further comprises means for diluting or administering the isolated molecule provided herein. In yet another aspect, provided herein is a pharmaceutical composition, comprising the isolated molecule provided herein and a pharmaceutically acceptable excipient.

[0021] In yet another aspect, the disclosure provides a method of selectively activating or recruiting CD8+ CTLs towards an undesired cell, comprising: contacting a population of lymphocytes with an isolated molecule comprising: a first antigen binding domain, a second antigen binding domain and a third antigen binding domain, wherein the first antigen binding domain specifically binds CD8, the second antigen binding domain specifically binds a TCR complex and the third antigen binding domain specifically binds an antigen expressed by an undesired cell, wherein the isolated molecule selectively activates or recruits CD8⁺ CTLs upon co-engagement of the TCR complex and CD8 and is unable to activate or recruit CD8⁺ CTLs in the absence of co-engagement of the TCR complex and CD8.

[0022] In yet another aspect, the disclosure also provides a method of selectively activating or recruiting CD8⁺ CTLs towards an undesired cell, comprising: contacting a population of lymphocytes with an isolated molecule comprising a first polypeptide, a second polypeptide and a third polypeptide, wherein the first polypeptide comprises, from N- to C-terminus, a second antigen binding domain comprising a scFv that specifically binds a TCR complex, a VH that is capable of specifically binding CD8, a CH1 domain, a hinge, a CH2 domain and a CH3 domain; the second polypeptide comprises, from N- to C-terminus, a VL that is capable of specifically binding CD8 and a CL domain; and the third polypeptide comprises, from N- to C-terminus, a third antigen binding domain comprising a scFv that specifically binds an antigen expressed by an undesired cell and a Fc or a fragment of the Fc, wherein the isolated molecule selectively activates or recruits CD8⁺ CTLs upon co-engagement of the TCR complex and CD8 and is unable to activate or recruit CD8⁺ CTLs in the absence of co-engagement of the TCR complex and CD8.

[0023] In yet another aspect, the disclosure also provides a method of selectively activating or recruiting CD8⁺ CTLs towards an undesired cell, comprising: contacting a population of lymphocytes with an isolated molecule comprising a first polypeptide, a second polypeptide and a third polypeptide, wherein the first polypeptide comprises, from N- to C-terminus, a VH that is capable of specifically binding CD8, a CH1 domain, a hinge, a CH2 domain and a CH3 domain; the second polypeptide comprises, from N- to C-terminus, a VL that is capable of specifically binding CD8, a CL domain and a second antigen binding domain comprising a scFv that specifically binds a TCR complex; and the third polypeptide comprises, from N- to C-terminus, a third antigen binding domain comprising a scFv that specifically binds an antigen expressed by an undesired cell and a Fc or a fragment of the Fc, wherein the isolated molecule selectively activates or recruits CD8⁺ CTLs upon co-engagement of the TCR complex and CD8 and is unable to activate or recruit CD8⁺ CTLs in the absence of co-engagement of the TCR complex and CD8.

[0024] In yet another aspect, the disclosure also provides a method of selectively activating or recruiting CD8⁺ CTLs towards an undesired cell, comprising: contacting a population of lymphocytes with an isolated molecule comprising a first polypeptide, a second polypeptide and a third polypeptide, wherein the first polypeptide comprises, from N- to C-terminus, a VH that is capable of specifically CD8, a CH1 domain, a hinge, a CH2 domain, a CH3 domain and a second antigen binding domain comprising a scFv that specifically binds a TCR complex; the second polypeptide comprises, from N- to C-terminus, a VL that is capable of specifically binding CD8 and a CL domain; and the third polypeptide comprises, from N- to C-terminus, a third antigen binding domain comprising a scFv that specifically binds an antigen expressed by an undesired cell and a Fc or a fragment of the Fc, wherein the isolated molecule selectively activates or recruits CD8⁺ CTLs upon co-engagement of the TCR complex and CD8 and is unable to activate or recruit CD8⁺ CTLs in the absence of co-engagement of the TCR complex and CD8.

[0025] In yet another aspect, the disclosure also provides a method of selectively activating or recruiting CD8⁺ CTLs towards an undesired cell in a subject, comprising: administering to the subject an isolated molecule comprising a first antigen binding domain, a second antigen binding domain and a third antigen binding domain, wherein the first antigen binding domain specifically binds CD8, the second antigen binding domain specifically binds a TCR complex and the third antigen binding domain specifically binds an antigen expressed by an undesired cell, wherein the isolated molecule selectively activates or recruits CD8⁺ CTLs upon co-engagement of the TCR complex and CD8 and is unable to activate or recruit CD8⁺ CTLs in the absence of co-engagement of the TCR complex and CD8.

[0026] In yet another aspect, the disclosure provides a method of providing an improved T cell redirection therapy for a subject in need thereof, comprising: administering to the subject an isolated molecule comprising a first antigen binding domain, a second antigen binding domain and a third antigen binding domain, wherein the first antigen binding domain specifically binds CD8, the second antigen binding domain specifically binds a TCR complex and the third antigen binding domain specifically binds an antigen expressed by an undesired cell, wherein the isolated molecule selectively activates or recruits CD8⁺ CTLs upon co-engagement of the TCR complex and CD8 and is unable to activate or recruit CD8⁺ CTLs in the absence of co-engagement of the TCR complex and CD8.

[0027] In yet another aspect, the disclosure also provides a method of providing an improved T cell redirection therapy to a subject in need thereof, comprising: administering to the subject an isolated molecule comprising a first polypeptide, a second polypeptide and a third polypeptide, wherein the first polypeptide comprises, from N- to C-terminus, a second antigen binding domain comprising a scFv that specifically binds a TCR complex, a VH that is capable of specifically binding CD8, a CH1 domain, a hinge, a CH2 domain and a CH3 domain; the second polypeptide comprises, from N- to C-terminus, a VL that is capable of specifically binding CD8 and a CL domain; and the third polypeptide comprises, from N- to C-terminus, a third antigen binding domain comprising a scFv that specifically binds an antigen expressed by an undesired cell and a Fc or a fragment of the Fc, wherein the isolated molecule selectively activates or recruits CD8⁺ CTLs upon co-engagement of the TCR complex and CD8 and is unable to activate or recruit CD8⁺ CTLs in the absence of co-engagement of the TCR complex and CD8.

[0028] In yet another aspect, the disclosure also provides a method of providing an improved T cell redirection therapy to a subject in need thereof, comprising: administering to the subject an isolated molecule comprising a first polypeptide, a second polypeptide and a third polypeptide, wherein the first polypeptide comprises, from N- to C-terminus, a VH that is capable of specifically binding CD8, a CH1 domain, a hinge, a CH2 domain and a CH3 domain; the second polypeptide comprises, from N- to C-terminus, a VL that is capable of specifically binding CD8, a CL domain and a second antigen binding domain comprising a scFv that specifically binds a TCR complex; and the third polypeptide comprises, from N- to C-terminus, a third antigen binding domain comprising a scFv that specifically binds an antigen expressed by an undesired cell and a Fc or a fragment of the Fc, wherein the isolated molecule selectively activates or recruits CD8⁺ CTLs upon co-engagement of the TCR complex and CD8 and is unable to activate or recruit CD8⁺ CTLs in the absence of co-engagement of the TCR complex and CD8.

[0029] In yet another aspect, the disclosure also provides a method of providing an improved T cell redirection therapy to a subject in need thereof, comprising: administering to the subject an isolated molecule comprising a first polypeptide, a second polypeptide and a third polypeptide, wherein the first polypeptide comprises, from N- to C-terminus, a VH that is capable of specifically CD8, a CH1 domain, a hinge, a CH2 domain, a CH3 domain and a second antigen binding domain comprising a scFv that specifically binds a TCR complex; the second polypeptide comprises, from N- to C-terminus, a VL that is capable of specifically binding CD8 and a CL domain; and the third polypeptide comprises, from N- to C-terminus, a third antigen binding domain comprising a scFv that specifically binds an antigen expressed by an undesired cell and a Fc or a fragment of the Fc, wherein the isolated molecule selectively activates or recruits CD8⁺ CTLs upon co-engagement of the TCR complex and CD8 and is unable to activate or recruit CD8⁺ CTLs in the absence of co-engagement of the TCR complex and CD8.

[0030] In yet another aspect, the disclosure provides a method of targeting CD8⁺ CTLs to an undesired cell in a subject, comprising administering to the subject an isolated molecule comprising a first antigen binding domain, a second antigen binding domain and a third antigen binding domain, wherein the first antigen binding domain specifically binds CD8, the second antigen binding domain specifically binds a TCR complex and the third antigen binding domain specifically binds an antigen expressed by the undesired cell, wherein the isolated molecule selectively activates or recruits CD8⁺ CTLs upon co-engagement of the TCR complex and CD8 and is unable to activate or recruit CD8⁺ CTLs in the absence of co-engagement of the TCR complex and CD8.

[0031] In yet another aspect, the disclosure also provides a method of targeting CD8⁺ CTLs to an undesired cell in a subject, comprising administering to the subject an isolated molecule comprising a first polypeptide, a second polypeptide and a third polypeptide, wherein the first polypeptide comprises, from N- to C-terminus, a second antigen binding domain comprising a scFv that specifically binds a TCR complex, a VH that is capable of specifically binding CD8, a CH1 domain, a hinge, a CH2 domain and a CH3 domain; the second polypeptide comprises, from N- to C-terminus, a VL that is capable of specifically binding CD8 and a CL domain; and the third polypeptide comprises, from N- to C-terminus, a third antigen binding domain comprising a scFv that specifically binds an antigen expressed by the undesired cell and a Fc or a fragment of the Fc, wherein the isolated molecule selectively activates or recruits CD8⁺ CTLs upon co-engagement of the TCR complex and CD8 and is unable to activate or recruit CD8⁺ CTLs in the absence of co-engagement of the TCR complex and CD8.

[0032] In yet another aspect, the disclosure also provides a method of targeting CD8⁺ CTLs to an undesired cell in a subject, comprising administering to the subject an isolated molecule comprising a first polypeptide, a second polypeptide and a third polypeptide, wherein the first polypeptide comprises, from N- to C-terminus, a VH that is capable of specifically binding CD8, a CH1 domain, a hinge, a CH2 domain and a CH3 domain; the second polypeptide comprises, from N- to C-terminus, a VL that is capable of specifically binding CD8, a CL domain and a second antigen binding domain comprising a scFv that specifically binds a TCR complex; and the third polypeptide comprises, from N- to C-terminus, a third antigen binding domain comprising a scFv that specifically binds an antigen expressed by the undesired cell and a Fc or a fragment of the Fc, wherein the isolated molecule selectively activates or recruits CD8⁺ CTLs upon co-engagement of the TCR complex and CD8 and is unable to activate or recruit CD8⁺ CTLs in the absence of co-engagement of the TCR complex and CD8

[0033] In yet another aspect, the disclosure also provides a method of targeting CD8⁺ CTLs to an undesired cell in a subject, comprising administering to the subject an isolated molecule comprising a first polypeptide, a second polypeptide and a third polypeptide, wherein the first polypeptide comprises, from N- to C-terminus, a VH that is capable of specifically CD8, a CH1 domain, a hinge, a CH2 domain, a CH3 domain and a second antigen binding domain comprising a scFv that specifically binds a TCR complex; the second polypeptide comprises, from N- to C-terminus, a VL that is capable of specifically binding CD8 and a CL domain; and the third polypeptide comprises, from N- to C-terminus, a third antigen binding domain comprising a scFv that specifically binds an antigen expressed by the undesired cell and a Fc or a fragment of the Fc, wherein the isolated molecule selectively activates or recruits CD8⁺ CTLs upon co-engagement of the TCR complex and CD8 and is unable to activate or recruit CD8⁺ CTLs in the absence of co-engagement of the TCR complex and CD8.

[0034] In yet another aspect, the disclosure provides a method of treating a cancer in a subject, comprising: administering to the subject an isolated molecule comprising a first antigen binding domain, a second antigen binding domain and a third antigen binding domain, wherein the first antigen binding domain specifically binds CD8, the second antigen binding domain specifically binds a TCR complex and the third antigen binding domain specifically binds an antigen expressed by an undesired cell, wherein the isolated molecule selectively activates or recruits CD8⁺ CTLs upon co-engagement of the TCR complex and CD8 and is unable to activate or recruit CD8⁺ CTLs in the absence of co-engagement of the TCR complex and CD8.

[0035] In yet another aspect, the disclosure also provides a method of treating a cancer in a subject, comprising administering to the subject an isolated molecule comprising a first polypeptide, a second polypeptide and a third polypeptide, wherein the first polypeptide comprises, from N- to C-terminus, a second antigen binding domain comprising a scFv that specifically binds a TCR complex, a VH that is capable of specifically binding CD8, a CH1 domain, a hinge, a CH2 domain and a CH3 domain; the second polypeptide comprises, from N- to C-terminus, a VL that is capable of specifically binding CD8 and a CL domain; and the third polypeptide comprises, from N- to C-terminus, a third antigen binding domain comprising a scFv that specifically binds an antigen expressed by an undesired cell and a Fc or a fragment of the Fc, wherein the isolated molecule selectively activates or recruits CD8⁺ CTLs upon co-engagement of the TCR complex and CD8 and is unable to activate or recruit CD8⁺ CTLs in the absence of co-engagement of the TCR complex and CD8.

[0036] In yet another aspect, the disclosure also provides a method of treating a cancer in a subject, comprising administering to the subject an isolated molecule comprising a first polypeptide, a second polypeptide and a third polypeptide, wherein the first polypeptide comprises, from N- to C-terminus, a VH that is capable of specifically binding CD8, a CH1 domain, a hinge, a CH2 domain and a CH3 domain; the second polypeptide comprises, from N- to C-terminus, a VL that is capable of specifically binding CD8, a CL domain and a second antigen binding domain comprising a scFv that specifically binds a TCR complex; and the third polypeptide comprises, from N- to C-terminus, a third antigen binding domain comprising a scFv that specifically binds an antigen expressed by an undesired cell and a Fc or a fragment of the Fc, wherein the isolated molecule selectively activates or recruits CD8⁺ CTLs upon co-engagement of the TCR complex and CD8 and is unable to activate or recruit CD8⁺ CTLs in the absence of co-engagement of the TCR complex and CD8.

[0037] In yet another aspect, the disclosure also provides a method of treating a cancer in a subject, comprising administering to the subject an isolated molecule comprising a first polypeptide, a second polypeptide and a third polypeptide, wherein the first polypeptide comprises, from N- to C-terminus, a VH that is capable of specifically CD8, a CH1 domain, a hinge, a CH2 domain, a CH3 domain and a second antigen binding domain comprising a scFv that specifically binds a TCR complex; the second polypeptide comprises, from N- to C-terminus, a VL that is capable of specifically binding CD8 and a CL domain; and the third polypeptide comprises, from N- to C-terminus, a third antigen binding domain comprising a scFv that specifically binds an antigen expressed by an undesired cell and a Fc or a fragment of the Fc, wherein the isolated molecule selectively activates or recruits CD8⁺ CTLs upon co-engagement of the TCR complex and CD8 and is unable to activate or recruit CD8⁺ CTLs in the absence of co-engagement of the TCR complex and CD8.

[0038] In yet another aspect, the disclosure provides a method of enhancing a CD8⁺ CTL response against an undesired cell in a subject, comprising: administering to the subject an isolated molecule comprising a first antigen binding domain, a second antigen binding domain and a third antigen binding domain, wherein the first antigen binding domain specifically binds CD8, the second antigen binding domain specifically binds a TCR complex and the third antigen binding domain specifically binds an antigen expressed by an undesired cell, wherein the isolated molecule selectively activates or recruits CD8⁺ CTLs upon co-engagement of the TCR complex and CD8 and is unable to activate or recruit CD8⁺ CTLs in the absence of co-engagement of the TCR complex and CD8.

[0039] In yet another aspect, the disclosure also provides a method of enhancing a CD8⁺ CTL response against an undesired cell in a subject, comprising administering to the subject an isolated molecule comprising a first polypeptide, a second polypeptide and a third polypeptide, wherein the first polypeptide comprises, from N- to C-terminus, a second antigen binding domain comprising a scFv that specifically binds a TCR complex, a VH that is capable of specifically binding CD8, a CH1 domain, a hinge, a CH2 domain and a CH3 domain; the second polypeptide comprises, from N- to C-terminus, a VL that is capable of specifically binding CD8 and a CL domain; and the third polypeptide comprises, from N- to C-terminus, a third antigen binding domain comprising a scFv that specifically binds an antigen expressed by an undesired cell and a Fc or a fragment of the Fc, wherein the isolated molecule selectively activates or recruits CD8⁺ CTLs upon co-engagement of the TCR complex and CD8 and is unable to activate or recruit CD8⁺ CTLs in the absence of co-engagement of the TCR complex and CD8.

[0040] In yet another aspect, the disclosure also provides a method of enhancing a CD8⁺ CTL response against an undesired cell in a subject, comprising administering to the subject an isolated molecule comprising a first polypeptide, a second polypeptide and a third polypeptide, wherein the first polypeptide comprises, from N- to C-terminus, a VH that is capable of specifically binding CD8, a CH1 domain, a hinge, a CH2 domain and a CH3 domain; the second polypeptide comprises, from N- to C-terminus, a VL that is capable of specifically binding CD8, a CL domain and a second antigen binding domain comprising a scFv that specifically binds a TCR complex; and the third polypeptide comprises, from N- to C-terminus, a third antigen binding domain comprising a scFv that specifically binds an antigen expressed by an undesired cell and a Fc or a fragment of the Fc, wherein the isolated molecule selectively activates or recruits CD8⁺ CTLs upon co-engagement of the TCR complex and CD8 and is unable to activate or recruit CD8⁺ CTLs in the absence of co-engagement of the TCR complex and CD8.

[0041] In yet another aspect, the disclosure also provides a method of enhancing a CD8⁺ CTL response against an undesired cell in a subject, comprising administering to the subject an isolated molecule comprising a first polypeptide, a second polypeptide and a third polypeptide, wherein the first polypeptide comprises, from N- to C-terminus, a VH that is capable of specifically CD9, a CH1 domain, a hinge, a CH2 domain, a CH3 domain and a second antigen binding domain comprising a scFv that specifically binds a TCR complex; the second polypeptide comprises, from N- to C-terminus, a VL that is capable of specifically binding CD8 and a CL domain; and the third polypeptide comprises, from N- to C-terminus, a third antigen binding domain comprising a scFv that specifically binds an antigen expressed by an undesired cell and a Fc or a fragment of the Fc, wherein the isolated molecule selectively activates or recruits CD8⁺ CTLs upon co-engagement of the TCR complex and CD8 and is unable to activate or recruit CD8⁺ CTLs in the absence of co-engagement of the TCR complex and CD8.

[0042] In some embodiments, the subject has a cancer, an infection, or an immune-mediated disease. In some embodiments, the cancer is a hematological malignancy or a solid tumor. In some embodiments, the hematological malignancy comprises acute lymphoblastic leukemia, acute myeloid leukemia, anaplastic large-cell lymphoma, Burkitt's lymphoma, chronic lymphocytic leukemia, chronic myeloid leukemia, diffuse large B-cell lymphoma, dendritic cell neoplasm, follicular lymphoma, hairy cell leukemia, Hodgkin's lymphoma, leukemia, B cell leukemia, T cell leukemia, light chain amyloidosis, lymphoma, B cell lymphoma, NK cell lymphoma, T cell lymphoma, mantle-cell lymphoma, marginal zone B-cell lymphoma, monoclonal gammopathy of undetermined significance, mucosa-associated lymphatic tissue lymphoma, multiple myeloma, myelodysplastic syndrome, non-Hodgkin's lymphoma, plasma cell leukemia, precursor B-cell lymphoblastic leukemia, smoldering multiple myeloma, Waldenstrom's macroglobulinemia, B cell malignancy, T cell malignancy, NK cell malignancy, or any combination thereof.

[0043] In some embodiments, the solid tumor comprises adenocarcinoma, anal cancer, basal cell carcinoma, biliary tract cancer, bladder cancer, bone cancer, breast cancer, cancer associated with infection, cancer of the adrenal gland, cancer of the endocrine system, cancer of the head or neck, cancer of the parathyroid gland, cancer of the penis, cancer of the thyroid gland, cancer of the urethra, cervical cancer, carcinoma of the breast, carcinoma of the fallopian tubes, carcinoma of the liver, carcinoma of the lung, carcinoma of the prostate, carcinoma of the renal pelvis, carcinoma of the vagina, carcinoma of the vulva, choriocarcinoma, clear cell carcinoma, colon cancer, colon carcinoma, colorectal cancer, connective tissue cancer, cutaneous or intraocular malignant melanoma, environmentally induced cancer, gastric cancer, gastrointestinal cancer, glioma, glioblastoma, endometrial cancer, epithelial cancer, esophageal cancer, eye cancer, larynx cancer, liver cancer, hepatocellular carcinoma, hormone refractory prostate adenocarcinoma, Kaposi's sarcoma, kidney cancer, lung cancer gastro-esophageal cancer, melanoma, mesothelioma, Merkel cell cancer, neuroblastoma, non-small cell lung cancer (NSCLC), osteosarcoma, ovarian cancer, pancreatic cancer, prostate cancer, rectal cancer, renal cell carcinoma, retinoblastoma rhabdomyosarcoma, squamous cell cancer, soft tissue sarcoma, solid tumors of childhood, spinal axis tumor, stomach cancer, testicular cancer, thyroid cancer, uterine cancer, urothelial carcinoma or sarcomas, or any combination thereof.

[0044] In some embodiments, the infection comprises infection with adenovirus, arboviral encephalitis virus, coronavirus, coxsackie virus, cytomegalovirus (CMV), dengue virus, echovirus, Epstein Barr virus, flaviviruses, human immunodeficiency virus (HIV), hepatitis A virus, hepatitis B virus, hepatitis C virus, herpes virus, HTLV virus, influenza virus, JC virus, measles virus, molluscum virus, mumps virus, papillomavirus, parvovirus, poliovirus, rabies virus, respiratory syncytial virus, rhinovirus, rotavirus, rubella virus or vaccinia virus, bacteria, virus, fungi, protozoa, parasite or prion, or any combination thereof.

[0045] In some embodiments, the immune-mediated disease comprises systemic lupus erythematosus (SLE), ankylosing spondylitis, Chagas disease, chronic obstructive pulmonary disease, Crohn's Disease, dermatomyositis, diabetes mellitus type 1, endometriosis, Goodpasture's syndrome, Graves' disease, Guillain-Barre syndrome (GBS), Hashimoto's disease, hidradenitis suppurativa, Kawasaki disease, IgA nephropathy, idiopathic thrombocytopenic purpura, interstitial cystitis, mixed connective tissue disease, morphea, multiple sclerosis, myasthenia gravis, narcolepsy, neuromyotonia, pemphigus vulgaris, pernicious anaemia, psoriasis, psoriatic arthritis, polymyositis, primary biliary cirrhosis, relapsing polychondritis, rheumatoid arthritis (RA), sarcoidosis, schizophrenia, scleroderma, Sjogren's syndrome, temporal arteritis, ulcerative colitis, vasculitis, vitiligo, Wegener's granulomatosis, IgG4-related disease, anti-synthetase syndrome, and autoimmunity associated with immunodeficiency including chronic variable immunodeficiency, Wiskott-Aldrich syndrome, Good syndrome, IgA deficiency, Hyper IgM syndrome, complement disorders, seropositive RA, SLE, postmyocardial infarction syndrome, subacute bacterial endocarditis, anti-glomerular basement membrane nephritis, autoimmune hepatitis, primary biliary cirrhosis, alopecia areata, bullous pemphigoid, cicatricial pemphigoid, dermatitis herpetiformis, gestational pemphigoid, pemphigus vulgaris, systemic scleroderma, Addison's disease, autoimmune polyendocrine syndrome type 2, autoimmune pancreatitis, diabetes mellitus type 1, autoimmune thyroiditis, Graves' disease, Sjogren's syndrome, celiac disease, antiphospholipid syndrome, autoimmune thrombocytopenic purpura, cold agglutinin disease, pernicious anemia, thrombocytopenia, adult onset Still's disease, CREST syndrome, drug-induced lupus, enthesitis-related arthritis, juvenile arthritis, mixed connective tissue disease, palindromic rheumatism, Parry Romberg syndrome, rheumatic fever, undifferentiated connective tissue disease, dermatomysitis, myasthenia gravis, neuromyotonia, paraneoplastic cerebellar degeneration, polymyositis, Bickerstaffs encephalitis, chronic inflammatory demyelinating polyneuropathy, Guillain-Barre syndrome, Hashimoto's encephalopathy, Lambert-Eaton myasthenic syndrome, multiple sclerosis, progressive inflammatory neuropathy, Stiff person syndrome, autoimmune uveitis, neuromyelitis optica, symphathetic ophthalmia, Meniere's disease, anti-neutrophil cytoplasmic antibody-associated vasculitis, Churg-Strauss syndrome, Henoch-Schonlein purpura, microscopic polyangiitis, urticarial vasculitis, and vasculitis. Examples of autoantibody-associated autoimmune conditions include gastritis and POEMS syndrome. Examples of autoantibody-associated (non-autoimmune) diseases include agammaglobulinemia, amyotrophic lateral sclerosis, Castleman's disease, cutaneous leukocytoclastic angiitis, eczema, eosinophilic gastroenteritis, erythroblastosis fetalis, fibrodysplasia ossificans progressive, hypogammaglobulinemia, idiopathic pulmonary fibrosis, IgA nephropathy, Majeed syndrome, narcolepsy, Rasmussen's encephalitis, spondyloarthropathy or Sweet's syndrome, or any combination thereof.

[0046] In yet another aspect, the disclosure provides a system comprising a means for selective activation or recruitment of CD8⁺ CTLs.

[0047] In yet another aspect, the disclosure also provides a composition comprising an antibody comprising a first antigen binding domain and a second antigen binding domain, and means for selective activation or recruitment of CD8⁺ CTLs.

[0048] In yet another aspect, the disclosure also provides a composition for enhancing an immune response against an antigen expressed by an undesired cell, comprising means for selective activation or recruitment of CD8⁺ CTLs.

[0049] In yet another aspect, the disclosure also provides a composition for treating a cancer in subject, comprising means for selective activation or recruitment of CD8⁺ CTLs.

[0050] In yet another aspect, the disclosure also provides a system comprising a means for providing an improved T cell redirecting therapeutic treatment to a subject.

[0051] In yet another aspect, the disclosure also provides a T cell redirecting therapeutic comprising a means for improving safety of the T cell redirecting therapeutic.

[0052] In yet another aspect, the disclosure also provides a process for generating an improved T cell redirecting therapeutic, comprising: a step for performing a function of designing the T cell redirecting therapeutic comprising the means of the disclosure; and a step for performing a function of producing the T cell redirecting therapeutic comprising the means of the disclosure.

[0053] In yet another aspect, the disclosure provides a method of isolating, separating, purifying, sorting, selecting or capturing a CD8+ CTL comprising: providing a sample comprising the CD8+ CTL; contacting the sample with an isolated molecule comprising a first antigen binding domain and a second antigen binding domain, wherein the first antigen binding domain specifically binds CD8 and the second antigen binding domain specifically binds a TCR complex; and isolating, separating, purifying, sorting, selecting or capturing the CD8⁺ CTL bound to the isolated molecule.

[0054] In yet another aspect, the disclosure also provides a method of isolating, separating, purifying, sorting, selecting or capturing a CD8+ CTL, comprising contacting the CD8+ CTL with an isolated molecule comprising a first antigen binding domain and a second antigen binding domain, wherein the first antigen binding domain specifically binds CD8 and the second antigen binding domain specifically binds a TCR complex; and isolating, separating, purifying, sorting, selecting or capturing the CD8+ CTL based on binding of the CD8+ CTL to the isolated molecule.

### BRIEF DESCRIPTION OF THE DRAWINGS

[0055] FIG. 1 shows the design of the Protein Format 1. In the Protein Format 1, the tumor associated antigen (TAA) binding arm was incorporated as a scFv coupled to a Fc (HC1_scFv), the CD8 binding arm was incorporated as a HC/LC chain (HC2 N-term and LC2 2nd N-term), and the CD3 binding arm was incorporated as a scFv attached to the N-terminus of the CD8 binding HC (LC2 1st N-term).

[0056] FIG. 2 shows the design of the Protein Format 2. In the Protein Format 2, the TAA binding arm was incorporated as a scFv coupled to the Fc (HC1_scFv), the CD8 binding arm was incorporated as a HC/LC chain (HC2 N-term and LC2 1st N-term), and the CD3 binding arm was incorporated as a scFv attached to the C-terminus of the CD8 binding LC (LC2 C-term).

[0057] FIG. 3 shows the design of the Protein Format 3. In the Protein Format 3, the TAA binding arm was incorporated as a scFv coupled to the Fc (HC1_scFv), the CD8 binding arm was incorporated as a HC/LC chain (HC2 N-term and LC1 1st N-term), and the CD3 binding arm was incorporated as a scFv attached to the C-terminus of the CD8 binding HC (HC2 C-term).

[0058] FIG. 4A-4B show low affinity CD3 multispecifics paired with CD8 binders show selective binding to CD8 T cells. FIG. 4A shows that the trispecific binds to and specifically recruits CD8 T cells. FIG. 4B shows that Pan T cells were isolated from the PBMCs of healthy volunteers and stained with the test multispecifics at room temperature for 30 min followed by detection using an anti-human IgG antibody and staining with anti-human CD3, CD4 and CD8 antibodies. % binding was determined using the secondary antibody-stained samples as negative controls.

[0059] FIG. 5A shows in the top panel cytotoxicity assay on C4-2B (target) and PBMCs (effector) at 3 different E:T ratios incubated for 72 h in the presence of CD8×CD3×PSMA trispecific Ab (black circle), CD8×PSMA bispecific Ab (black square) and CD3×PSMA bispecific Ab (grey triangle). EC50 values listed in the table are for the CD8×CD3×PSMA trispecific Ab (CD8B573.001). The low panel in FIG. 5A shows cytotoxicity assay on C4-2B (target) and PBMCs (effector) with E:T ratio of 3:1 and incubated for 72 h (left) and 48 h (right) in the presence of indicated Ab. Table list EC50 values for CD3×CD8×PSMA (low affinity CD3), CD3×PSMA (CD8B52, CD3B376) [medium affinity CD3], CD3×PSMA (CD3B220, HA) [high affinity CD3].

[0060] FIG. 5B shows the IncuCyte cytotoxicity assay on target cell line C4-2B and PBMCs (2 donors: 19054280 and 19053791) in the presence of indicated Ab ranging from 0 (NBS) to 60 nM.

[0061] FIG. 6 shows low affinity CD3 multispecifics paired with CD8 binders show potent cytotoxicity against target cell lines in a CD8 T cell dependent manner. PBMCs of healthy volunteers were either depleted of CD8 T cells or used as such. CD8 depleted and non depleted PBMCs were cocultured with C4-2B target cells as a 1:1 effector to target ratio (CD3 to target cells) for 72 hrs in the presence of the test multispecifics. Cytotoxicity was monitored using the Incucyte automated live cell analysis system and EC50 values were calculated after normalizing to no multispecific containing wells.

[0062] FIG. 7 shows low affinity CD3 multispecifics paired with CD8 binders specifically and potently activate only CD8 T cells. PBMCs were cocultured with C4-2B target cells as a 1:1 effector to target ratio (CD3 to target cells) for the indicated time points in the presence of the test multispecifics. At each time point, cells were harvested and CD3, CD4 and CD8 T cells were analyzed for the presence of the indicated activation and exhaustion markers.

[0063] FIG. 8 shows low affinity CD3 multispecifics paired with CD8 binders show reduced anti-inflammatory cytokine release. PBMCs were cocultured with C4-2B target cells as a 1:1 effector to target ratio (CD3 to target cells) for the indicated time points in the presence of the test multispecifics. At each time point, supernatants were harvested and analyzed for the indicated cytokines using a multiplex Luminex analysis system.

### DETAILED DESCRIPTION

[0064] The disclosed methods may be understood more readily by reference to the following detailed description taken in connection with the accompanying Figures, which form a part of this disclosure. It is to be understood that the disclosed methods are not limited to the specific methods described and/or shown herein, and that the terminology used herein is for the purpose of describing particular embodiments by way of example only and is not intended to be limiting of the claimed compositions or methods.

[0065] All patents, published patent applications and publications cited herein are incorporated by reference as if set forth fully herein.

[0066] When a list is presented, unless stated otherwise, it is to be understood that each individual element of that list, and every combination of that list, is a separate embodiment. For example, a list of embodiments presented as “A, B, or C” is to be interpreted as including the embodiments, “A,” “B,” “C,” “A or B,” “A or C,” “B or C,” or “A, B, or C.”

[0067] As used in this specification and the appended claims, the singular forms “a,” “an,” and “the” include plural referents unless the content clearly dictates otherwise. Thus, for example, reference to “a cell” includes a combination of two or more cells, and the like.

[0068] The transitional terms “comprising,” “consisting essentially of,” and “consisting of” are intended to connote their generally accepted meaning, that is, (i) “comprising,” which is synonymous with “including,” “containing,” or “characterized by,” is inclusive or open-ended and does not exclude additional, unrecited elements or method steps; (ii) “consisting of” excludes any element, step, or ingredient not specified in the claim; and (iii) “consisting essentially of” limits the scope of a claim to the specified materials or steps “and those that do not materially affect the basic and novel characteristic(s)” of the claimed invention. Embodiments described in terms of the phrase “comprising” (or its equivalents) also provide as embodiments those independently described in terms of “consisting of” and “consisting essentially of.”

[0069] “About” means within an acceptable error range for the particular value as determined by one of ordinary skill in the art, which will depend in part on how the value is measured or determined, i.e., the limitations of the measurement system. Unless explicitly stated otherwise within the Examples or elsewhere in the Specification in the context of a particular assay, result or embodiment, “about” means within one standard deviation per the practice in the art, or a range of up to 5%, whichever is larger.

[0070] “Activate” or “activation” or “activated” refers to induction of a change in the biologic state of a cell resulting in expression of activation markers, cytokine production, proliferation or mediating cytotoxicity of target cells. Cells may be activated by primary stimulatory signals. Co-stimulatory signals may amplify the magnitude of the primary signals and suppress cell death following initial stimulation resulting in a more durable activation state and thus a higher cytotoxic capacity. An exemplary activated cell is an activated CD8⁺ CTL that expresses CD25 and/or produces cytokines such as IFNγ.

[0071] “Affinity” or “binding affinity” or “binds with affinity” refers to the strength of the sum total of noncovalent interactions between a single binding site of a molecule (such as molecules and multispecific antibodies described herein) and its binding partner (i.e., an antigen). Unless indicated otherwise, “affinity” refers to intrinsic binding affinity which reflects a 1:1 interaction between members of a binding pair. The affinity can generally be represented by the dissociation constant (K_{D}). Affinity can be measured by known methods, such as using biolayer interferometry (BLI) or surface plasmon resonance (SPR) assays by Octet®, using, for example, an Octet®Red96 system, or by Biacore®, using, for example, a Biacore®TM-2000 or a Biacore®TM-3000. An “on-rate” or “rate of association” or “association rate” or “kon” and an “of-rate” or “rate of dissociation” or “dissociation rate” or “koff” may also be determined with the same methods. “High affinity” within the context of this disclosure refers to molecules which demonstrate stronger binding to an antigen (e.g., lower K_{D}). “Low affinity” within the context of this disclosure refers to molecules which demonstrate weaker binding to an antigen (e.g., higher K_{D}).

[0072] “Non-antibody scaffold” refers to a single chain protein framework that contains a structured core associated with variable domains of high conformational tolerance. The variable domains tolerate variation to be introduced without compromising scaffold integrity, and hence the variable domains can be engineered and selected for binding to a specific antigen.

[0073] “Antigen” refers to any molecule (e.g., protein, peptide, polysaccharide, glycoprotein, glycolipid, nucleic acid, portions thereof, or combinations thereof) that is capable of mediating an immune response either alone or in complex in MHC. Exemplary immune responses include antibody production and activation of immune cells, such as T cells, B cells or NK cells. Antigens may be expressed by genes, synthetized, or purified from biological samples such as a tissue sample, a tumor sample, a cell or a fluid with other biological components, organisms, subunits of proteins/antigens, killed or inactivated whole cells or lysates.

[0074] “Antigen binding domain” or “antigen binding fragment” or “domain that binds an antigen” refers to a portion of a molecule that specifically binds an antigen. Antigen binding domain may include portions of an immunoglobulin that bind an antigen, such as a VH, a VL, the VH and the VL, Fab, Fab′, F(ab′)2, Fd and Fv fragments, domain antibodies (dAb) consisting of one VH or one VL, shark variable IgNAR domains, camelized VH domains, VHH, minimal recognition units consisting of the amino acid residues that mimic the CDRs of an antibody, such as FR3-CDR3-FR4 portions, the HCDR1, the HCDR2 and/or the HCDR3 and the LCDR1, the LCDR2 and/or the LCDR3 and non-antibody scaffolds that bind an antigen.

[0075] “Antibodies” is meant in a broad sense and includes immunoglobulin molecules including monoclonal antibodies including murine, human, humanized and chimeric monoclonal antibodies, antigen binding domains, multispecific antibodies, such as bispecific, trispecific, tetraspecific, dimeric, trimeric, tetrameric or multimeric antibodies, single chain antibodies, domain antibodies and any other modified configuration of the immunoglobulin molecule that comprises an antigen binding site of the required specificity. “Full length antibodies” are comprised of two heavy chains (HC) and two light chains (LC) inter-connected by disulfide bonds as well as multimers thereof (e.g., IgM). Each heavy chain is comprised of a heavy chain variable region (VH) and a heavy chain constant region (comprised of domains CH1, hinge, CH2 and CH3). Each light chain is comprised of a light chain variable region (VL) and a light chain constant region (CL). The VH and the VL regions may be further subdivided into regions of hypervariability, termed complementarity determining regions (CDR), interspersed with framework regions (FR). Each VH and VL is composed of three CDRs and four FR segments, arranged from amino-to-carboxy-terminus in the following order: FR1, CDR1, FR2, CDR2, FR3, CDR3 and FR4. Immunoglobulins may be assigned to five major classes, IgA, IgD, IgE, IgG and IgM, depending on the heavy chain constant domain amino acid sequence. IgA and IgG are further sub-classified as the isotypes IgA1, IgA2, IgG1, IgG2, IgG3 and IgG4. Antibody light chains of any vertebrate species may be assigned to one of two clearly distinct types, namely kappa (κ) and lambda (λ), based on the amino acid sequences of their constant domains.

[0076] “Bispecific” refers to a molecule that specifically binds two distinct antigens or two distinct epitopes within the same antigen. The bispecific molecule may have cross-reactivity to other related antigens, for example to the same antigen from other species (homologs), such as human or monkey, for example Macaca cynomolgus (cynomolgus, cyno) or Pan troglodytes, or may bind an epitope that is shared between two or more distinct antigens.

[0077] “Cancer” refers to a broad group of various diseases characterized by the uncontrolled growth of abnormal cells in the body. Unregulated cell division and growth results in the formation of malignant tumors that invade neighboring tissues and may also metastasize to distant parts of the body through the lymphatic system or bloodstream. A “cancer” or “cancer tissue” can include a tumor.

[0078] “Cancer cell” or “tumor cell” refers to a cancerous, pre-cancerous or transformed cell, either in vivo, ex vivo, or in tissue culture, that has spontaneous or induced phenotypic changes. Cancer cells may exhibit characteristics such as morphological changes, immortalization, aberrant growth, foci formation, proliferation, malignancy, modulation of tumor specific marker levels or invasiveness.

[0079] “CH2 domain” or “CH2 region” refers to the CH2 region of an immunoglobulin. The CH2 region of a human IgG1 antibody corresponds to amino acid residues 231-340 (EU numbering) of IgG1 constant domain. The amino acid sequence of a wild-type IGG1 CH2 domain is shown in SEQ ID NO: 2318.

(IgG1 CH2)
SEQ ID NO: 2318
APELLGGPSVFLFPPKPKDTLMISRTPEVTCVVVDVSHEDPEVKFNWY
VDGVEVHNAKTKPREEQYNSTYRVVSVLTVLHQDWLNGKEYKCKVSNK
ALPAPIEKTISKA

[0080] “CH3 domain” or “CH3 region” refers to the CH3 region of an immunoglobulin. The CH3 region of human IgG1 antibody corresponds to amino acid residues 341-446 (EU numbering) of IgG1 constant domain. The amino acid sequence of a wild-type IgG1 CH3 domain is shown in SEQ ID NO: 2319.

SEQ ID NO: 2319
GQPREPQVYTLPPSRDELTKNQVSLTCLVKGFYPSDIAVEWESNGQPE
NNYKTTPPVLDSDGSFFLYSKLTVDKSRWQQGNVFSCSVMHEALHNHY
TQKSLSLSPGK

[0081] “CD3ε” refers to CD3ε from any species, such as from primate or rodent, such as human, monkey, rat or mouse. Human CD3ε comprises the amino acid sequence of SEQ ID NO: 2180.

(CD3ϵ)
SEQ ID NO: 2180
DGNEEMGGITQTPYKVSISGTTVILTCPQYPGSEILWQHNDKNIGGDE
DDKNIGSDEDHLSLKEFSELEQSGYYVCYPRGSKPEDANFYLYLRARV
CENCMEMDVMSVATIVIVDICITGGLLLLVYYWSKNRKAKAKPVTRGA
GAGGRQRGQNKERPPPVPNPDYEPIRKGQRDLYSGLNQRRI

[0082] “CD8” refers to CD8 from any species, such as from primate or rodent, such as human, monkey, rat or mouse. Human CD8 is a homodimer of alpha chains (CD8a) or a heterodimer of CD8α (SEQ ID NO: 2181) and CD8β (SEQ ID NO: 2182) chains.

(CD8α chain)
SEQ ID NO: 2181
SQFRVSPLDRTWNLGETVELKCQVLLSNPTSGCSWLFQPRGAAASPTF
LLYLSQNKPKAAEGLDTQRFSGKRLGDTFVLTLSDFRRENEGYYFCSA
LSNSIMYFSHFVPVFLPAKPTTTPAPRPPTPAPTIASQPLSLRPEACR
PAAGGAVHTRGLDFACDIYIWAPLAGTCGVLLLSLVITLYCNHRNRRR
VCKCPRPVVKSGDKPSLSARYV
(CD8β chain)
SEQ ID NO: 2182
LQQTPAYIKVQTNKMVMLSCEAKISLSNMRIYWLRQRQAPSSDSHHEF
LALWDSAKGTIHGEEVEQEKIAVFRDASRFILNLTSVKPEDSGIYFCM
IVGSPELTFGKGTQLSVVDFLPTTAQPTKKSTLKKRVCRLPRPETQKG
PLCSPITLGLLVAGVLVLLVSLGVAIHLCCRRRRARLRFMKQFYK

[0083] “Complementarity determining regions” (CDR) are regions of an antibody that bind an antigen. There are three CDRs in the VH (HCDR1, HCDR2, HCDR3) and three CDRs in the VL (LCDR1, LCDR2, LCDR3). CDRs may be defined using various delineations such as Kabat (Wu et al. (1970) J Exp Med 132: 211-50; Kabat et al., Sequences of Proteins of Immunological Interest, 5th Ed. Public Health Service, National Institutes of Health, Bethesda, Md., 1991; Kabat et al., J. Biol. Chem. 252:6609-6616 (1977); Kabat, Adv. Prot. Chem. 32:1-75 (1978)), Chothia (Chothia et al. (1987) J Mol Biol 196: 901-17), IMGT (Lefranc et al. (2003) Dev Comp Immunol 27: 55-77). Both terminologies are well recognized in the art. CDR region sequences have also been defined by AbM, AbM (Martin and Thornton J Bmol Biol 263: 800-15, 1996), Contact and IMGT. The correspondence between the various delineations and variable region numbering is described (see e.g., Lefranc et al. (2003) Dev Comp Immunol 27: 55-77; Honegger and Pluckthun, J Mol Biol (2001) 309:657-70; International ImMunoGeneTics (IMGT) database; Web resources, http://www_imgt_org). Available programs such as abYsis by UCL Business PLC may be used to delineate CDRs. The term “CDR”, “HCDR1”, “HCDR2”, “HCDR3”, “LCDR1”, “LCDR2” and “LCDR3” as used herein includes CDRs defined by any of the methods described supra, Kabat, Chothia, IMGT, AbM or Contact, unless otherwise explicitly stated in the specification.

[0084] The light chain variable region CDR1 domain is interchangeably referred to herein as LCDR1 or VL CDR1. The light chain variable region CDR2 domain is interchangeably referred to herein as LCDR2 or VL CDR2. The light chain variable region CDR3 domain is interchangeably referred to herein as LCDR3 or VL CDR3. The heavy chain variable region CDR1 domain is interchangeably referred to herein as HCDR1 or VH CDR1. The heavy chain variable region CDR2 domain is interchangeably referred to herein as HCDR2 or VH CDR2. The heavy chain variable region CDR1 domain is interchangeably referred to herein as HCDR3 or VH CDR3.

[0085] Exemplary CDR region sequences are illustrated herein, for example, in the tables provided in the Examples below. The positions of CDRs within a canonical antibody variable region have been determined by comparison of numerous structures (Al-Lazikani et al., J. Mol. Biol. 273:927-948 (1997); Morea et al., Methods 20:267-279 (2000)). Because the number of residues within a hypervariable region varies in different antibodies, additional residues relative to the canonical positions are conventionally numbered with a, b, c and so forth next to the residue number in the canonical variable region numbering scheme (Al-Lazikani et al., supra (1997)). Such nomenclature is similarly well known to those skilled in the art.

[0086] The term “hypervariable region”, such as a VH or VL, when used herein refers to the regions of an antibody variable region that are hypervariable in sequence and/or form structurally defined loops. Generally, antibodies comprise six hypervariable regions; three in the VH (HCDR1, HCDR2, HCDR3), and three in the VL (LCDR1, LCDR2, LCDR3). A number of hypervariable region delineations are in use and are encompassed herein. The “Kabat” CDRs are based on sequence variability and are the most commonly used (see, e.g., Kabat et al., Sequences of Proteins of Immunological Interest, 5th Ed. Public Health Service, National Institutes of Health, Bethesda, Md. (1991)). “Chothia” refers instead to the location of the structural loops (see, e.g., Chothia and Lesk, J. Mol. Biol. 196:901-917 (1987)). The end of the Chothia CDR-HCDR1 loop when numbered using the Kabat numbering convention varies between H32 and H34 depending on the length of the loop (this is because the Kabat numbering scheme places the insertions at H35A and H35B; if neither 35A nor 35B is present, the loop ends at 32; if only 35A is present, the loop ends at 33; if both 35A and 35B are present, the loop ends at 34). The “AbM” hypervariable regions represent a compromise between the Kabat CDRs and Chothia structural loops, and are used by Oxford Molecular's AbM antibody modeling software (see, e.g., Martin, in Antibody Engineering, Vol. 2, Chapter 3, Springer Verlag). “Contact” hypervariable regions are based on an analysis of the available complex crystal structures.

[0087] Recently, a universal numbering system has been developed and widely adopted, ImMunoGeneTics (IMGT) Information System® (Lafranc et al., Dev. Comp. Immunol. 27(1):55-77 (2003)). IMGT is an integrated information system specializing in immunoglobulins (IG), T cell receptors (TR) and major histocompatibility complex (MHC) of human and other vertebrates. Herein, the CDRs are referred to in terms of both the amino acid sequence and the location within the light or heavy chain. As the “location” of the CDRs within the structure of the immunoglobulin variable domain is conserved between species and present in structures called loops, by using numbering systems that align variable domain sequences according to structural features, CDR and framework residues and are readily identified. This information can be used in grafting and replacement of CDR residues from immunoglobulins of one species into an acceptor framework from, typically, a human antibody. An additional numbering system (AHon) has been developed by Honegger and Plückthun, J. Mol. Biol. 309: 657-670 (2001). Correspondence between the numbering system, including, for example, the Kabat numbering and the IMGT unique numbering system, is well known to one skilled in the art (see, e.g., Kabat, supra; Chothia and Lesk, supra; Martin, supra; Lefranc et al., supra). An Exemplary system, shown herein, combines Kabat and Chothia.

| | Exemplary | IMGT | Kabat | AbM | Chothia | Contact |
|---|---|---|---|---|---|---|
| V_{H} CDR1 | 26-35 | 27-38 | 31-35 | 26-35 | 26-32 | 30-35 |
| V_{H} CDR2 | 50-65 | 56-65 | 50-65 | 50-58 | 53-55 | 47-58 |
| V_{H} CDR3 | 95-102 | 105-117 | 95-102 | 95-102 | 96-101 | 93-101 |
| V_{L} CDR1 | 24-34 | 27-38 | 24-34 | 24-34 | 26-32 | 30-36 |
| V_{L} CDR2 | 50-56 | 56-65 | 50-56 | 50-56 | 50-52 | 46-55 |
| V_{L} CDR3 | 89-97 | 105-117 | 89-97 | 89-97 | 91-96 | 89-96 |

[0088] Hypervariable regions may comprise “extended hypervariable regions” as follows: 24-36 or 24-34 (LCDR1), 46-56 or 50-56 (LCDR2) and 89-97 or 89-96 (LCDR3) in the VL and 26-35 or 26-35A (HCDR1), 50-65 or 49-65 (HCDR2) and 93-102, 94-102, or 95-102 (HCDR3) in the VH. CDR sequences, reflecting each of the above numbering schemes, are provided herein, including in the tables provided in the Examples below.

[0089] “Reduce” or “reduced” refers to a decrease in a measured response mediated by a test molecule in any system in vitro or in vivo when compared to a control. Measured response may be an Fc-mediated effector function such as ADCC, CDC and/or ADCP, cellular proliferation or activation, or cell killing. “Reduced” may be a reduction of about 10%, 20%, 30%, 40%, 50%, 60%, 70%, 80%, 90%, 100% or more, or a statistically significant reduction when compared to a control. Suitable controls depend on the assay or response and are known.

[0090] “Enhance” or “enhanced” refers to an increase in a measured response mediated by a test molecule in any system in vitro or in vivo when compared to a control. Measured response may be an Fc-mediated effector function such as ADCC, CDC and/or ADCP, cellular proliferation or activation, or cell killing. “Enhanced” may be an increase of about 10%, 20%, 30%, 40%, 50%, 60%, 70%, 80%, 90%, 100% or more, or a statistically significant increase when compared to a control. Suitable controls depend on the assay or response and are known.

[0091] “Domain antibody” or “dAb” refers to an antibody fragment composed of a VH domain.

[0092] “Fab” or “Fab fragment” refers to an antibody fragment composed of VH, CH1, VL and CL domains.

[0093] “F(ab′)₂” or “F(ab′)₂ fragment” refers to an antibody fragment containing two Fab fragments connected by a disulfide bridge in the hinge region.

[0094] “Fc” or “Fc region” or “Fc domain” refers to an antibody region comprising at least a portion of a hinge region, a CH2 domain and a CH3 domain. The Fc may be generated by digestion of an antibody with papain, or pepsin where the Fc is the fragment obtained thereby, which includes one or both CH2-CH3 domains of and a portion of the hinge region.

[0095] “Fd” or “Fd fragment” refers to an antibody fragment composed of VH and CH1 domains.

[0096] “Fv” or “Fv fragment” refers to an antibody fragment composed of the VH and the VL domains from a single arm of the antibody.

[0097] “Full length antibody” is comprised of two heavy chains (HC) and two light chains (LC) inter-connected by disulfide bonds as well as multimers thereof (e.g., IgM). Each heavy chain is comprised of a VH and a heavy chain constant domain, the heavy chain constant domain comprised of subdomains CH1, hinge, CH2 and CH3. Each light chain is comprised of a VL and a light chain constant domain (CL). The VH and the VL may be further subdivided into regions of hypervariability, termed complementarity determining regions (CDR), interspersed with framework regions (FR). Each VH and VL is composed of three CDRs and four FR segments, arranged from amino-to-carboxy-terminus in the following order: FR1, CDR1, FR2, CDR2, FR3, CDR3 and FR4.

[0098] “Half molecule”, in the context of an antibody that comprises two heavy chains of fragments thereof (such as two Fc regions), refers to one heavy chain or a fragment thereof and any additional polypeptides that associate with the one heavy chain or fragment thereof or are conjugated to the one heavy chain or fragment thereof. An exemplary half molecule is a molecule comprising a scFv conjugated to Fc. Another exemplary half molecule is a molecule comprising a HC conjugated to scFv.

[0099] “Human antibody” refers to an antibody that is optimized to have minimal immune response when administered to a human subject. Variable regions of human antibody are derived from human immunoglobulin sequences. If human antibody contains a constant region or a portion of the constant region, the constant region is also derived from human immunoglobulin sequences. Human antibody comprises heavy and light chain variable regions that are “derived from” sequences of human origin if the variable regions of the human antibody are obtained from a system that uses human germline immunoglobulin or rearranged immunoglobulin genes. Such exemplary systems are human immunoglobulin gene libraries displayed on phage, and transgenic non-human animals such as mice, rats or chicken carrying human immunoglobulin loci. “Human antibody” typically contains amino acid differences when compared to the immunoglobulins expressed in humans due to differences between the systems used to obtain the human antibody and human immunoglobulin loci, introduction of somatic mutations or intentional introduction of substitutions into the frameworks or CDRs, or both. Typically, “human antibody” is at least about 80%, 81%, 82%, 83%, 84%, 85%, 86%, 87%, 88%, 89%, 90%, 91%, 92%, 93%, 94%, 95%, 96%, 97%, 98% or 99% identical in amino acid sequence to an amino acid sequence encoded by human germline immunoglobulin or rearranged immunoglobulin genes. In some instances, “human antibody” may contain consensus framework sequences derived from human framework sequence analyses, for example as described in Knappik et al., (2000) J Mol Biol 296:57-86, or a synthetic HCDR3 incorporated into human immunoglobulin gene libraries displayed on phage, for example as described in Shi et al., (2010) J Mol Biol 397:385-96, and in Int. Patent Publ. No. WO2009/085462. Antibodies in which at least one CDR is derived from a non-human species are not included in the definition of “human antibody”.

[0100] “Humanized antibody” refers to an antibody in which at least one CDR is derived from non-human species and at least one framework is derived from human immunoglobulin sequences. Humanized antibody may include substitutions in the frameworks so that the frameworks may not be exact copies of expressed human immunoglobulin or human immunoglobulin germline gene sequences.

[0101] The terms “identical” or percent “identity,” in the context of two or more nucleic acids or polypeptide sequences (e.g., CD8 antibody and polynucleotides that encode them), refer to two or more sequences or subsequences that are the same or have a specified percentage of amino acid residues or nucleotides that are the same, when compared and aligned for maximum correspondence, as measured using one of the following sequence comparison algorithms or by visual inspection.

[0102] For sequence comparison, typically one sequence acts as a reference sequence, to which test sequences are compared. When using a sequence comparison algorithm, test and reference sequences are input into a computer, subsequence coordinates are designated, if necessary, and sequence algorithm program parameters are designated. The sequence comparison algorithm then calculates the percent sequence identity for the test sequence(s) relative to the reference sequence, based on the designated program parameters.

[0103] Optimal alignment of sequences for comparison can be conducted, e.g., by the local homology algorithm of Smith & Waterman, Adv. Appl. Math. 2:482 (1981), by the homology alignment algorithm of Needleman & Wunsch, J. Mol. Biol. 48:443 (1970), by the search for similarity method of Pearson & Lipman, Proc. Nat'l. Acad. Sci. USA 85:2444 (1988), by computerized implementations of these algorithms (GAP, BESTFIT, FASTA, and TFASTA in the Wisconsin Genetics Software Package, Genetics Computer Group, 575 Science Dr., Madison, Wis.), or by visual inspection (see generally, Current Protocols in Molecular Biology, F. M. Ausubel et al., eds., Current Protocols, a joint venture between Greene Publishing Associates, Inc. and John Wiley & Sons, Inc., (1995 Supplement) (Ausubel)).

[0104] Examples of algorithms that are suitable for determining percent sequence identity and sequence similarity are the BLAST and BLAST 2.0 algorithms, which are described in Altschul et al. (1990) J. Mol. Biol. 215: 403-410 and Altschul et al. (1997) Nucleic Acids Res. 25: 3389-3402, respectively. Software for performing BLAST analyses is publicly available through the National Center for Biotechnology Information. This algorithm involves first identifying high scoring sequence pairs (HSPs) by identifying short words of length W in the query sequence, which either match or satisfy some positive-valued threshold score T when aligned with a word of the same length in a database sequence. T is referred to as the neighborhood word score threshold (Altschul et al., supra). These initial neighborhood word hits act as seeds for initiating searches to find longer HSPs containing them. The word hits are then extended in both directions along each sequence for as far as the cumulative alignment score can be increased.

[0105] Cumulative scores are calculated using, for nucleotide sequences, the parameters M (reward score for a pair of matching residues; always >0) and N (penalty score for mismatching residues; always <0). For amino acid sequences, a scoring matrix is used to calculate the cumulative score. Extension of the word hits in each direction are halted when: the cumulative alignment score falls off by the quantity X from its maximum achieved value; the cumulative score goes to zero or below, due to the accumulation of one or more negative-scoring residue alignments; or the end of either sequence is reached. The BLAST algorithm parameters W, T, and X determine the sensitivity and speed of the alignment. The BLASTN program (for nucleotide sequences) uses as defaults a word length (W) of 11, an expectation (E) of 10, M=5, N=−4, and a comparison of both strands. For amino acid sequences, the BLASTP program uses as defaults a word length (W) of 3, an expectation (E) of 10, and the BLOSUM62 scoring matrix (see Henikoff & Henikoff, Proc. Natl. Acad. Sci. USA 89:10915 (1989)).

[0106] In addition to calculating percent sequence identity, the BLAST algorithm also performs a statistical analysis of the similarity between two sequences (see, e.g., Karlin & Altschul, Proc. Nat'l. Acad. Sci. USA 90:5873-5787 (1993)). One measure of similarity provided by the BLAST algorithm is the smallest sum probability (P(N)), which provides an indication of the probability by which a match between two nucleotide or amino acid sequences would occur by chance. For example, a nucleic acid is considered similar to a reference sequence if the smallest sum probability in a comparison of the test nucleic acid to the reference nucleic acid is less than about 0.1, more preferably less than about 0.01, and most preferably less than about 0.001.

[0107] A further indication that two nucleic acid sequences or polypeptides are substantially identical is that the polypeptide encoded by the first nucleic acid is immunologically cross reactive with the polypeptide encoded by the second nucleic acid, as described below. Thus, a polypeptide is typically substantially identical to a second polypeptide, for example, where the two peptides differ only by conservative substitutions. Another indication that two nucleic acid sequences are substantially identical is that the two molecules hybridize to each other under stringent conditions.

[0108] “Isolated” refers to a homogenous population of molecules (such as synthetic polynucleotides or polypeptides) which have been substantially separated and/or purified away from other components of the system the molecules are produced in, such as a recombinant cell, as well as a protein that has been subjected to at least one purification or isolation step. “Isolated” refers to a molecule that is substantially free of other cellular material and/or chemicals and encompasses molecules that are isolated to a higher purity, such as to 80%, 81%, 82%, 83%, 84%, 85%, 86%, 87%, 88%, 89%, 90%, 91%, 92%, 93%, 94%, 95%, 96%, 97%, 98%, 99% or 100% purity.

[0109] “Monoclonal antibody” refers to an antibody obtained from a substantially homogenous population of antibody molecules, i.e., the individual antibodies comprising the population are identical except for possible well-known alterations such as removal of C-terminal lysine from the antibody heavy chain or post-translational modifications such as amino acid isomerization or deamidation, methionine oxidation or asparagine or glutamine deamidation. Monoclonal antibodies typically bind one antigenic epitope. A bispecific monoclonal antibody binds two distinct antigenic epitopes. Monoclonal antibodies may have heterogeneous glycosylation within the antibody population. Monoclonal antibody may be monospecific or multispecific such as bispecific, trispecific, monovalent, bivalent, trivalent or multivalent.

[0110] “Multispecific” refers to a molecule that specifically binds two or more distinct antigens or two or more distinct epitopes within the same antigen. Multispecific molecule may have cross-reactivity to other related antigens, for example to the same antigen from other species (homologs), such as human or monkey, for example Macaca fascicularis (cynomolgus, cyno) or Pan troglodytes, or may bind an epitope that is shared between two or more distinct antigens.

[0111] “Molecule” refers to a protein that may be monomeric, multimeric, homodimeric or heterodimeric protein. Multimeric protein may be composed of two or more identical or distinct subunits. Trimeric protein is composed of three subunits which may be identical or distinct, or alternatively, two subunits may be identical and the third subunit distinct.

[0112] “Pharmaceutical composition” refers to a composition that results from combining an active ingredient and one or more pharmaceutically acceptable carriers.

[0113] “Pharmaceutically acceptable carrier” or “excipient” refers to an ingredient in a pharmaceutical composition, other than the active ingredient, which is nontoxic to a subject. Exemplary pharmaceutically acceptable carriers are a buffer, stabilizer or preservative.

[0114] “Prevent,” “preventing,” or “prophylaxis” of a disease or disorder means preventing that a disorder occurs in a subject.

[0115] “Protein” or “polypeptide” are used interchangeably herein are refers to a molecule that comprises one or more polypeptides each comprised of at least two amino acid residues linked by a peptide bond. Protein may be a monomer, or may be protein complex of two or more subunits, the subunits being identical or distinct. Small polypeptides of less than 50 amino acids may be referred to as “peptides”. Protein may be a heterologous fusion protein, a glycoprotein, or a protein modified by post-translational modifications such as phosphorylation, acetylation, myristoylation, palmitoylation, glycosylation, oxidation, formylation, amidation, citrullination, polyglutamylation, ADP-ribosylation, pegylation or biotinylation. Protein may be recombinantly expressed.

[0116] “Recombinant” refers to polynucleotides, polypeptides, vectors, viruses and other macromolecules that are prepared, expressed, created or isolated by recombinant means.

[0117] “Sample” refers to a collection of similar fluids, cells, or tissues isolated from a subject, as well as fluids, cells, or tissues present within a subject. Exemplary samples are biological fluids such as blood, serum and serosal fluids, plasma, lymph, urine, saliva, cystic fluid, tear drops, feces, sputum, mucosal secretions of the secretory tissues and organs, vaginal secretions, ascites fluids such as those associated with non-solid tumors, fluids of the pleural, pericardial, peritoneal, abdominal and other body cavities, fluids collected by bronchial lavage, liquid solutions contacted with a subject or biological source, for example, cell and organ culture medium including cell or organ conditioned medium, lavage fluids and the like, tissue biopsies, fine needle aspirations or surgically resected tumor tissue.

[0118] “Single chain Fv” or “scFv” refers to a fusion protein comprising a VH and a VL, which are optionally linked via a polypeptide linker. scFv may have the VL and VH variable regions in either order, e.g., with respect to the N-terminal and C-terminal ends of the polypeptide, the scFv may comprise VL-linker-VH or may comprise VH-linker-VL. scFv may comprise one or more disulfide bonds to stabilize the scFv.

[0119] “Specifically binds,” “specific binding,” “specifically binding” or “binds” refer to a molecule comprising an antigen binding domain that binds the antigen with greater affinity than other antigens. Typically, the molecule binds the antigen with a dissociation constant (K_{D}) of about 1×10⁻⁷ M or less, for example about 5×10⁻⁸ M or less, about 1×10⁻⁸M or less, about 1×10⁻⁹M or less, about 1×10⁻¹⁰ M or less, about 1×10⁻¹¹ M or less, or about 1×10⁻¹²M or less, typically with the K_{D} that is at least one hundred fold less than its K_{D} for binding to a non-specific antigen (e.g., BSA, casein).

[0120] “Subject” includes any human or nonhuman animal. “Nonhuman animal” includes all vertebrates, e.g., mammals and non-mammals, such as nonhuman primates, sheep, dogs, cats, horses, cows, chickens, amphibians, reptiles, etc. The terms “subject” and “patient” can be used interchangeably herein.

[0121] “T cell receptor complex” (TCR complex) refers to a known TCR complex comprising of a TCRα and TCRβ chains, CD3ε, CD3γ, CD3δ and CD3ζ molecules. In some instances, TCRα and TCRβ chains are replaced by TCRγ and TCRζ chains. The amino acid sequences of the various proteins forming the TCR complex are well-known.

[0122] “Therapeutically effective amount” or “effective amount” used interchangeably herein, refers to an amount effective, at dosages and for periods of time necessary, to achieve a desired therapeutic result. A therapeutically effective amount may vary according to factors such as the disease state, age, sex, and weight of the individual, and the ability of a therapeutic or a combination of therapeutics to elicit a desired response in the individual. Example indicators of an effective therapeutic or combination of therapeutics that include, for example, improved wellbeing of the patient, reduction of a tumor burden, arrested or slowed growth of a tumor, and/or absence of metastasis of cancer cells to other locations in the body.

[0123] “Treat,” “treating” or “treatment” of a disease or disorder such as cancer refers to accomplishing one or more of the following: reducing the severity and/or duration of the disorder, inhibiting worsening of symptoms characteristic of the disorder being treated, limiting or preventing recurrence of the disorder in subjects that have previously had the disorder, or limiting or preventing recurrence of symptoms in subjects that were previously symptomatic for the disorder.

[0124] “Trispecific” refers to a molecule that specifically binds three distinct antigens or three distinct epitopes within the same antigen. Trispecific molecule may have cross-reactivity to other related antigens, for example to the same antigen from other species (homologs), such as human or monkey, for example Macaca cynomolgus (cynomolgus, cyno) or Pan troglodytes, or may bind an epitope that is shared between two or more distinct antigens.

[0125] “Unable to activate” in the context of CD8⁺ CTL activation refers to a molecule that exhibits no measurable activation of CD8⁺ CTLs in a system, such as in an in vitro assay. CD8⁺ CTL activation may be measured using known methods, such as assessing increased CD25 expression or by production IFNγ by the CD8⁺ CTL.

[0126] “Undesired cell” refers to a cell that is desired or intended to be removed from a system, such as an in vitro system an ex vivo system, a tissue, blood, sample, or from a subject.

[0127] “Expressed by an undesired cell” refers to a measurable intracellular or surface expression of an antigen by the undesired cell.

[0128] “VHH” refers to a single chain antigen binding domain derived from camelid antibodies which are devoid of light chains.

[0129] “BCMA” refers to B cell maturation antigen (TNFRSF17, CD269), a transmembrane protein belonging to the tumor necrosis family receptor (TNFR) superfamily that is primarily expressed on terminally differentiated B cells. BCMA expression is restricted to the B cell lineage and mainly present on plasma cells and plasmablasts and to some extent on memory B cells, but virtually absent on peripheral and naive B cells. BCMA is also expressed on multiple myeloma (MM) cells, on leukemia cells and lymphoma cells. The amino acid sequence of human BCMA is shown in SEQ ID NO: 2320. The extracellular domain spans residues 1-54, the transmembrane domain spans residues 55-77 and the cytoplasmic domain spans residues 78-184 of SEQ ID NO: 2320.

(BCMA)
SEQ ID NO: 2320
MLQMAGQCSQNEYFDSLLHACIPCQLRCSSNTPPLTCQRYCNASVTNS
VKGTNAILWTCLGLSLIISLAVFVLMFLLRKINSEPLKDEFKNTGSGL
LGMANIDLEKSRTGDEIILPRGLEYTVEECTCEDCIKSKPKVDSDHCF
PLPAMEEGATILVTTKTNDYCKSLPAALSATEIEKSISAR

[0130] “PSMA” refers to Prostate Specific Membrane Antigen. The amino acid sequence of the human PSMA is shown in SEQ ID NO: 2321. The extracellular domain spans residues 44-750, the transmembrane domain spans residues 20-43 and the cytoplasmic domain spans residues 1-19 of SEQ ID NO: 2321.

(PSMA)
SEQ ID NO: 2321
MWNLLHETDSAVATARRPRWLCAGALVLAGGFFLLGFLFGWFIKSSNE
ATNITPKHNMKAFLDELKAENIKKFLYNFTQIPHLAGTEQNFQLAKQI
QSQWKEFGLDSVELAHYDVLLSYPNKTHPNYISIINEDGNEIFNTSLF
EPPPPGYENVSDIVPPFSAFSPQGMPEGDLVYVNYARTEDFFKLERDM
KINCSGKIVIARYGKVFRGNKVKNAQLAGAKGVILYSDPADYFAPGVK
SYPDGWNLPGGGVQRGNILNLNGAGDPLTPGYPANEYAYRRGIAEAVG
LPSIPVHPIGYYDAQKLLEKMGGSAPPDSSWRGSLKVPYNVGPGFTGN
FSTQKVKMHIHSTNEVTRIYNVIGTLRGAVEPDRYVILGGHRDSWVFG
GIDPQSGAAVVHEIVRSFGTLKKEGWRPRRTILFASWDAEEFGLLGST
EWAEENSRLLQERGVAYINADSSIEGNYTLRVDCTPLMYSLVHNLTKE
LKSPDEGFEGKSLYESWTKKSPSPEFSGMPRISKLGSGNDFEVFFQRL
GIASGRARYTKNWETNKFSGYPLYHSVYETYELVEKFYDPMFKYHLTV
AQVRGGMVFELANSIVLPFDCRDYAVVLRKYADKIYSISMKHPQEMKT
YSVSFDSLFSAVKNFTEIASKFSERLQDFDKSNPIVLRMMNDQLMFLE
RAFIDPLGLPDRPFYRHVIYAPSSHNKYAGESFPGIYDALFDIESKVD
PSKAWGEVKRQIYVAAFTVQAAAETLSEVA

[0131] The numbering of amino acid residues in the antibody constant region throughout the specification is according to the EU index as described in Kabat et al., Sequences of Proteins of Immunological Interest, 5th Ed. Public Health Service, National Institutes of Health, Bethesda, Md. (1991), unless otherwise explicitly stated. Various antibody numbering schemes are available at ImMunoGeneTics (IMGT) website via IMGT scientific charts.

[0132] Mutations in the Ig constant regions are referred to as follows: L351Y_F405A_Y407V refers to L351Y, F405A and Y407V mutations in an immunoglobulin chain. L351Y_F405A_Y407V/T394W refers to L351Y, F405A and Y407V mutations in a first immunoglobulin chain and T394W mutation in the second immunoglobulin chain in a heterodimeric molecule comprising both the first and the second immunoglobulin chains.

[0133] Compositions of Matter

[0134] The disclosure provides molecules having improved characteristics and functionality. The molecules of the disclosure selectively activate or recruit CD8⁺ CTLs without activating or recruiting non-CTL CD8 expressing cells. Without wishing to be bound by any particular theory, it is expected that the molecules of the disclosure provide a benefit in terms of therapeutic treatment when compared to other T cell redirecting molecules, mediating more efficient killing or undesired cells and exhibiting reduced side effect profile, particularly cytokine release syndrome observed with CD3 binding T cell redirecting molecules. The molecules of the disclosure may be utilized broadly to deplete or partially deplete any undesired cell, such as cancer cell, a virus infected cell, an immune cell, an inflamed cell, a damaged cell, a dysplastic cell, an immunogenic cell, a metaplastic cell or a mutant cell, or any combination thereof. The molecules of the disclosure therefore have utility across a spectrum of disease indications including cancer, infectious disease and immune-mediated diseases. The molecules of the disclosure have been designed in a manner that co-engagement of CD8 and CD3 is needed for activation and/or recruitment of the CD8⁺ CTLs. The molecules of the disclosure may be used to treat any mammalian or non-mammalian subject. The molecules of the disclosure may also be used to isolate, separate, purify, sort, select or capture CD8⁺ CTLs.

[0135] The disclosure provides an isolated molecule, comprising: a first antigen binding domain and a second antigen binding domain, wherein the first antigen binding domain specifically binds CD8 and the second antigen binding domain specifically binds a TCR complex.

[0136] The disclosure also provides an isolated molecule, comprising: a first antigen binding domain, a second antigen binding domain and a third antigen binding domain, wherein the first antigen binding domain specifically binds CD8, the second antigen binding domain specifically binds a TCR complex, and the third antigen binding domain specifically binds a third antigen.

[0137] In some embodiments, the third antigen comprises an antigen expressed by an undesired cell.

[0138] The disclosure also provides an isolated molecule, comprising: a first antigen binding domain, a second antigen binding domain and a third antigen binding domain, wherein the first antigen binding domain specifically binds CD8, the second antigen binding domain specifically binds a TCR complex, and the third antigen binding domain specifically binds an antigen expressed by an undesired cell.

[0139] The disclosure also provides an isolated molecule, comprising: a first antigen binding domain, a second antigen binding domain and a third antigen binding domain, wherein the first antigen binding domain specifically binds CD8, the second antigen binding domain specifically binds a TCR complex, and the third antigen binding domain specifically binds an antigen expressed by an undesired cell, wherein the isolated molecule activates or recruits CD8⁺ CTLs upon co-engagement of the TCR complex and CD8.

[0140] The disclosure also provides an isolated molecule, comprising: a first antigen binding domain, a second antigen binding domain and a third antigen binding domain, wherein the first antigen binding domain specifically binds CD8, the second antigen binding domain specifically binds a TCR complex, and the third antigen binding domain specifically binds an antigen expressed by an undesired cell, wherein the isolated molecule activates or recruits CD8⁺ CTLs upon co-engagement of the TCR complex and CD8 and is unable to activate or recruit CD8⁺ CTLs in the absence of co-engagement of the TCR complex and CD8.

[0141] The disclosure also provides an isolated molecule, comprising: a first antigen binding domain, a second antigen binding domain and a third antigen binding domain, wherein the first antigen binding domain specifically binds CD8, the second antigen binding domain specifically binds a TCR complex, and the third antigen binding domain specifically binds an antigen expressed by an undesired cell, wherein the first antigen binding domain specifically binds CD8 and the second antigen binding domain specifically binds the TCR with affinities that result in activation or recruitment of CD8⁺ CTLs only upon co-engagement of the TCR complex and CD8.

[0142] In some embodiments, the isolated molecule is an isolated antibody.

[0143] In some embodiments, the isolated molecule is based on one or more non-antibody scaffolds.

[0144] The disclosure also provides an isolated multispecific antibody, comprising: a first antigen binding domain and a second antigen binding domain, wherein the first antigen binding domain specifically binds CD8 and the second antigen binding domain specifically binds a TCR complex.

[0145] The disclosure also provides an isolated multispecific antibody, comprising: a first half molecule and a second half molecule, wherein the first half molecule comprises a first antigen binding domain and a second antigen binding domain and the second half molecule comprises a third antigen binding domain, wherein the first antigen binding domain specifically binds CD8, the second antigen binding domain specifically binds a TCR complex, and the third antigen binding domain specifically binds a third antigen.

[0146] In some embodiments, the third antigen comprises an antigen expressed by an undesired cell.

[0147] The disclosure also provides an isolated multispecific antibody, comprising: a first half molecule and a second half molecule, wherein the first half molecule comprises a first antigen binding domain and a second antigen binding domain and the second half molecule comprises a third antigen binding domain, wherein the first antigen binding domain specifically binds CD8, the second antigen binding domain specifically binds a TCR complex, and the third antigen binding domain specifically binds an antigen expressed by an undesired cell.

[0148] The disclosure also provides an isolated multispecific antibody, comprising: a first half molecule and a second half molecule, wherein the first half molecule comprises a first antigen binding domain and a second antigen binding domain and the second half molecule comprises a third antigen binding domain, wherein the first antigen binding domain specifically binds CD8, the second antigen binding domain specifically binds a TCR complex, and the third antigen binding domain specifically binds an antigen expressed by an undesired cell, wherein the isolated multispecific antibody activates or recruits CD8⁺ CTLs upon co-engagement of the TCR complex and CD8.

[0149] The disclosure also provides an isolated multispecific antibody, comprising: a first half molecule and a second half molecule, wherein the first half molecule comprises a first antigen binding domain and a second antigen binding domain and the second half molecule comprises a third antigen binding domain, wherein the first antigen binding domain specifically binds CD8, the second antigen binding domain specifically binds a TCR complex, and the third antigen binding domain specifically binds an antigen expressed by an undesired cell, wherein the isolated multispecific antibody activates or recruits CD8⁺ CTLs upon co-engagement of the TCR complex and CD8 and wherein the isolated multispecific antibody is unable to activate or recruit CD8⁺ CTLs in the absence of co-engagement of the TCR complex and CD8.

[0150] The disclosure also provides an isolated multispecific antibody, comprising: a first half molecule and a second half molecule, wherein the first half molecule comprises a first antigen binding domain and a second antigen binding domain and the second half molecule comprises a third antigen binding domain, wherein the first antigen binding domain specifically binds CD8, the second antigen binding domain specifically binds a TCR complex, and the third antigen binding domain specifically binds an antigen expressed by an undesired cell, wherein the first antigen binding domain specifically binds CD8 and the second antigen binding domain specifically binds the TCR complex with affinities that result in activation or recruitment of CD8⁺ CTLs only upon co-engagement of the TCR complex and CD8.

[0151] The affinities (e.g., binding affinities) with which the isolated molecules or isolated multispecific antibodies of the disclosure bind to the various antigens are expressed as dissociation constants (K_{D}).

[0152] In some embodiments, the first antigen binding domain specifically binds CD8 with the K_{D} of about 0.1×10⁻⁹ M or higher, such as about 0.2×10⁻⁹ M or higher, about 0.3×10⁻⁹ M or higher, about 0.4×10⁻⁹ M or higher, about 0.5×10⁻⁹ M or higher, about 0.6×10⁻⁹ M or higher, about 0.7×10⁻⁹ M or higher, about 0.8×10⁻⁹ M or higher, about 0.9×10⁻⁹ M or higher, 1×10⁻⁹ M or higher, about 2×10⁻⁹ M or higher, about 3×10⁻⁹ M or higher, about 4×10⁻⁹ M or higher, about 5×10⁻⁹ M or higher, about 6×10⁻⁹ M or higher, about 7×10⁻⁹ M or higher, about 8×10⁻⁹ M or higher, about 9×10⁻⁹ M or higher, about 10×10⁻⁹ M or higher, about 15×10⁻⁹ M or higher, about 20×10⁻⁹ M or higher, about 25×10⁻⁹ M or higher, about 30×10⁻⁹ M or higher, about 35×10⁻⁹ M or higher, about 40×10⁻⁹ M or higher, about 45×10⁻⁹ M or higher, 50×10⁻⁹ M or higher, about 55×10⁻⁹ M or higher, about 60×10⁻⁹ M or higher, about 65×10⁻⁹ M or higher, about 70×10⁻⁹ M or higher, about 75×10⁻⁹ M or higher, about 80×10⁻⁹ M or higher, about 85×10⁻⁹ M or higher, about 90×10⁻⁹ M or higher, about 95×10⁻⁹ M or higher, about 100×10⁻⁹ M or higher, about 110×10⁻⁹ M or higher, about 120×10⁻⁹ M or higher, about 130×10⁻⁹ M or higher, about 140×10⁻⁹ M or higher, about 150×10⁻⁹ M or higher, about 160×10⁻⁹ M or higher, about 170×10⁻⁹ M or higher, about 180×10⁻⁹ M or higher, about 190×10⁻⁹ M or higher, about 200×10⁻⁹ M or higher, about 210×10⁻⁹ M or higher, about 220×10⁻⁹ M or higher, about 230×10⁻⁹ M or higher, about 240×10⁻⁹ M or higher, about 250×10⁻⁹ M or higher, about 260×10⁻⁹ M or higher, about 270×10⁻⁹ M or higher, about 280×10⁻⁹ M or higher, about 290×10⁻⁹ M or higher, about 300×10⁻⁹ M or higher, about 310×10⁻⁹ M or higher, about 320×10⁻⁹ M or higher, about 330×10⁻⁹ M or higher, about 340×10⁻⁹ M or higher, about 350×10⁻⁹ M or higher, about 360×10⁻⁹ M or higher, about 370×10⁻⁹ M or higher, about 380×10⁻⁹ M or higher, about 390×10⁻⁹ M or higher, about 400×10⁻⁹ M or higher, about 410×10⁻⁹ M or higher, about 420×10⁻⁹ M or higher, about 430×10⁻⁹ M or higher, about 440×10⁻⁹ M or higher, about 450×10⁻⁹ M or higher, about 460×10⁻⁹ M or higher, about 470×10⁻⁹ M or higher, about 480×10⁻⁹ M or higher, about 490×10⁻⁹ M or higher, about 400×10⁻⁹ M or higher, about 510×10⁻⁹ M or higher, about 520×10⁻⁹ M or higher, about 530×10⁻⁹ M or higher, about 540×10⁻⁹ M or higher, about 550×10⁻⁹ M or higher, about 560×10⁻⁹ M or higher, about 570×10⁻⁹ M or higher, about 580×10⁻⁹ M or higher, about 590×10⁻⁹ M or higher, about 600×10⁻⁹ M or higher, about 610×10⁻⁹ M or higher, about 620×10⁻⁹ M or higher, about 630×10⁻⁹ M or higher, about 640×10⁻⁹ M or higher, about 650×10⁻⁹ M or higher, about 660×10⁻⁹ M or higher, about 670×10⁻⁹ M or higher, about 680×10⁻⁹ M or higher, about 690×10⁻⁹ M or higher, about 700×10⁻⁹ M or higher, about 710×10⁻⁹ M or higher, about 720×10⁻⁹ M or higher, about 730×10⁻⁹ M or higher, about 740×10⁻⁹ M or higher, about 750×10⁻⁹ M or higher, about 760×10⁻⁹ M or higher, about 770×10⁻⁹ M or higher, about 780×10⁻⁹ M or higher, about 790×10⁻⁹ M or higher, about 800×10⁻⁹ M or higher, about 810×10⁻⁹ M or higher, about 820×10⁻⁹ M or higher, about 830×10⁻⁹ M or higher, about 840×10⁻⁹ M or higher, about 850×10⁻⁹ M or higher, about 860×10⁻⁹ M or higher, about 870×10⁻⁹ M or higher, about 880×10⁻⁹ M or higher, about 890×10⁻⁹ M or higher, about 900×10⁻⁹ M or higher, about 910×10⁻⁹ M or higher, about 920×10⁻⁹ M or higher, about 930×10⁻⁹ M or higher, about 940×10⁻⁹ M or higher, about 950×10⁻⁹ M or higher, about 960×10⁻⁹ M or higher, about 970×10⁻⁹ M or higher, about 980×10⁻⁹ M or higher, about 990×10⁻⁹ M or higher or about 1,000×10⁻⁹ M or higher.

[0153] In some embodiments, the first antigen binding domain specifically binds CD8 with the K_{D} of from about 0.1×10⁻⁹ M to about 1,000×10⁻⁹ M. In some embodiments, the first antigen binding domain specifically binds CD8 with the K_{D} of from about 0.5×10⁻⁹ M to about 700×10⁻⁹ M. In some embodiments, the first antigen binding domain specifically binds CD8 with the K_{D} of from about 0.5×10⁻⁹ M to about 500×10⁻⁹ M. In some embodiments, the first antigen binding domain specifically binds CD8 with the K_{D} of from about 0.5×10⁻⁹ M to about 400×10⁻⁹ M. In some embodiments, the first antigen binding domain specifically binds CD8 with the K_{D} of from about 1×10⁻⁹ M to about 400×10⁻⁹ M. In some embodiments, the first antigen binding domain specifically binds CD8 with the K_{D} of from about 0.5×10⁻⁹ M to about 300×10⁻⁹ M. In some embodiments, the first antigen binding domain specifically binds CD8 with the K_{D} of from about 1×10⁻⁹ M to about 300×10⁻⁹ M.

[0154] In some embodiments, the first antigen binding domain specifically binds CD8 with the K_{D} of about 0.1×10⁻⁹ M, such as about 0.2×10⁻⁹ M, about 0.3×10⁻⁹ M, about 0.4×10⁻⁹ M, about 0.5×10⁻⁹ M, about 0.6×10⁻⁹ M, about 0.7×10⁻⁹ M, about 0.8×10⁻⁹ M, about 0.9×10⁻⁹ M, about 50×10⁻⁹ M, about 55×10⁻⁹ M, about 60×10⁻⁹ M, about 65×10⁻⁹ M, about 70×10⁻⁹ M, about 75×10⁻⁹ M, about 80×10⁻⁹ M, about 85×10⁻⁹ M, about 90×10⁻⁹ M, about 95×10⁻⁹ M, about 100×10⁻⁹ M, about 110×10⁻⁹ M, about 120×10⁻⁹ M, about 130×10⁻⁹ M, about 140×10⁻⁹ M, about 150×10⁻⁹ M, about 160×10⁻⁹ M, about 170×10⁻⁹ M, about 180×10⁻⁹ M, about 190×10⁻⁹ M, about 200×10⁻⁹ M, about 210×10⁻⁹ M, about 220×10⁻⁹ M, about 230×10⁻⁹ M, about 240×10⁻⁹ M, about 250×10⁻⁹ M, about 260×10⁻⁹ M, about 270×10⁻⁹ M, about 280×10⁻⁹ M, about 290×10⁻⁹ M, about 300×10⁻⁹ M, about 310×10⁻⁹ M, about 320×10⁻⁹ M, about 330×10⁻⁹ M, about 340×10⁻⁹ M, about 350×10⁻⁹ M, about 360×10⁻⁹ M, about 370×10⁻⁹ M, about 380×10⁻⁹ M, about 390×10⁻⁹ M, about 400×10⁻⁹ M, about 410×10⁻⁹ M, about 420×10⁻⁹ M, about 430×10⁻⁹ M, about 440×10⁻⁹ M, about 450×10⁻⁹ M, about 460×10⁻⁹ M, about 470×10⁻⁹ M, about 480×10⁻⁹ M, about 490×10⁻⁹ M, about 400×10⁻⁹ M, about 510×10⁻⁹ M, about 520×10⁻⁹ M, about 530×10⁻⁹ M, about 540×10⁻⁹ M, about 550×10⁻⁹ M, about 560×10⁻⁹ M, about 570×10⁻⁹ M, about 580×10⁻⁹ M, about 590×10⁻⁹ M, about 600×10⁻⁹ M, about 610×10⁻⁹ M, about 620×10⁻⁹ M, about 630×10⁻⁹ M, about 640×10⁻⁹ M, about 650×10⁻⁹ M, about 660×10⁻⁹ M, about 670×10⁻⁹ M, about 680×10⁻⁹ M, about 690×10⁻⁹ M, about 700×10⁻⁹ M, about 710×10⁻⁹ M, about 720×10⁻⁹ M, about 730×10⁻⁹ M, about 740×10⁻⁹ M, about 750×10⁻⁹ M, about 760×10⁻⁹ M, about 770×10⁻⁹ M, about 780×10⁻⁹ M, about 790×10⁻⁹ M, about 800×10⁻⁹ M, about 810×10⁻⁹ M, about 820×10⁻⁹ M, about 830×10⁻⁹ M, about 840×10⁻⁹ M, about 850×10⁻⁹ M, about 860×10⁻⁹ M, about 870×10⁻⁹ M, about 880×10⁻⁹ M, about 890×10⁻⁹ M, about 900×10⁻⁹ M, about 910×10⁻⁹ M, about 920×10⁻⁹ M, about 930×10⁻⁹ M, about 940×10⁻⁹ M, about 950×10⁻⁹ M, about 960×10⁻⁹ M, about 970×10⁻⁹ M, about 980×10⁻⁹ M, about 990×10⁻⁹ M, or about 1,000×10⁻⁹ M.

[0155] In some embodiments, the second antigen binding domain specifically binds the TCR complex with the K_{D} of about 10×10⁻⁹ M or higher, such as about 20×10⁻⁹ M or higher, about 30×10⁻⁹ M or higher, about 40×10⁻⁹ M or higher, about 50×10⁻⁹ M or higher, such as about 55×10⁻⁹ M or higher, about 60×10⁻⁹ M or higher, about 65×10⁻⁹ M or higher, about 70×10⁻⁹ M or higher, about 75×10⁻⁹ M or higher, about 80×10⁻⁹ M or higher, about 85×10⁻⁹ M or higher, about 90×10⁻⁹ M or higher, about 95×10⁻⁹ M or higher, about 100×10⁻⁹ M or higher, about 110×10⁻⁹ M or higher, about 120×10⁻⁹ M or higher, about 130×10⁻⁹ M or higher, about 140×10⁻⁹ M or higher, about 150×10⁻⁹ M or higher, about 160×10⁻⁹ M or higher, about 170×10⁻⁹ M or higher, about 180×10⁻⁹ M or higher, about 190×10⁻⁹ M or higher, about 200×10⁻⁹ M or higher, about 210×10⁻⁹ M or higher, about 220×10⁻⁹ M or higher, about 230×10⁻⁹ M or higher, about 240×10⁻⁹ M or higher, about 250×10⁻⁹ M or higher, about 260×10⁻⁹ M or higher, about 270×10⁻⁹ M or higher, about 280×10⁻⁹ M or higher, about 290×10⁻⁹ M or higher, about 300×10⁻⁹ M or higher, about 310×10⁻⁹ M or higher, about 320×10⁻⁹ M or higher, about 330×10⁻⁹ M or higher, about 340×10⁻⁹ M or higher, about 350×10⁻⁹ M or higher, about 360×10⁻⁹ M or higher, about 370×10⁻⁹ M or higher, about 380×10⁻⁹ M or higher, about 390×10⁻⁹ M or higher, about 400×10⁻⁹ M or higher, about 410×10⁻⁹ M or higher, about 420×10⁻⁹ M or higher, about 430×10⁻⁹ M or higher, about 440×10⁻⁹ M or higher, about 450×10⁻⁹ M or higher, about 460×10⁻⁹ M or higher, about 470×10⁻⁹ M or higher, about 480×10⁻⁹ M or higher, about 490×10⁻⁹ M or higher, about 400×10⁻⁹ M or higher, about 510×10⁻⁹ M or higher, about 520×10⁻⁹ M or higher, about 530×10⁻⁹ M or higher, about 540×10⁻⁹ M or higher, about 550×10⁻⁹ M or higher, about 560×10⁻⁹ M or higher, about 570×10⁻⁹ M or higher, about 580×10⁻⁹ M or higher, about 590×10⁻⁹ M or higher, about 600×10⁻⁹ M or higher, about 610×10⁻⁹ M or higher, about 620×10⁻⁹ M or higher, about 630×10⁻⁹ M or higher, about 640×10⁻⁹ M or higher, about 650×10⁻⁹ M or higher, about 660×10⁻⁹ M or higher, about 670×10⁻⁹ M or higher, about 680×10⁻⁹ M or higher, about 690×10⁻⁹ M or higher, about 700×10⁻⁹ M or higher, about 710×10⁻⁹ M or higher, about 720×10⁻⁹ M or higher, about 730×10⁻⁹ M or higher, about 740×10⁻⁹ M or higher, about 750×10⁻⁹ M or higher, about 760×10⁻⁹ M or higher, about 770×10⁻⁹ M or higher, about 780×10⁻⁹ M or higher, about 790×10⁻⁹ M or higher, about 800×10⁻⁹ M or higher, about 810×10⁻⁹ M or higher, about 820×10⁻⁹ M or higher, about 830×10⁻⁹ M or higher, about 840×10⁻⁹ M or higher, about 850×10⁻⁹ M or higher, about 860×10⁻⁹ M or higher, about 870×10⁻⁹ M or higher, about 880×10⁻⁹ M or higher, about 890×10⁻⁹ M or higher, about 900×10⁻⁹ M or higher, about 910×10⁻⁹ M or higher, about 920×10⁻⁹ M or higher, about 930×10⁻⁹ M or higher, about 940×10⁻⁹ M or higher, about 950×10⁻⁹ M or higher, about 960×10⁻⁹ M or higher, about 970×10⁻⁹ M or higher, about 980×10⁻⁹ M or higher, about 990×10⁻⁹ M or higher or about 1,000×10⁻⁹ M or higher.

[0156] In some embodiments, the second antigen binding domain specifically binds the TCR complex with the K_{D} of from about 50×10⁻⁹ M to about 1,000×10⁻⁹ M. In some embodiments, the second antigen binding domain specifically binds the TCR complex with the K_{D} of from about 50×10⁻⁹ M to about 700×10⁻⁹ M. In some embodiments, the second antigen binding domain specifically binds the TCR complex with the K_{D} of from about 50×10⁻⁹ M to about 500×10⁻⁹ M. In some embodiments, the second antigen binding domain specifically binds the TCR complex with the K_{D} of from about 50×10⁻⁹ M to about 400×10⁻⁹ M. In some embodiments, the second antigen binding domain specifically binds the TCR complex with the K_{D} of from about 100×10⁻⁹ M to about 400×10⁻⁹ M. In some embodiments, the second antigen binding domain specifically binds the TCR complex with the K_{D} of from about 50×10⁻⁹ M to about 300×10⁻⁹ M. In some embodiments, the second antigen binding domain specifically binds the TCR complex with the K_{D} of from about 100×10⁻⁹ M to about 300×10⁻⁹ M.

[0157] In some embodiments, the second antigen binding domain specifically binds the TCR complex with the K_{D} of about 50×10⁻⁹ M, about 55×10⁻⁹ M, about 60×10⁻⁹ M, about 65×10⁻⁹ M, about 70×10⁻⁹ M, about 75×10⁻⁹ M, about 80×10⁻⁹ M, about 85×10⁻⁹ M, about 90×10⁻⁹ M, about 95×10⁻⁹ M, about 100×10⁻⁹ M, about 110×10⁻⁹ M, about 120×10⁻⁹ M, about 130×10⁻⁹ M, about 140×10⁻⁹ M, about 150×10⁻⁹ M, about 160×10⁻⁹ M, about 170×10⁻⁹ M, about 180×10⁻⁹ M, about 190×10⁻⁹ M, about 200×10⁻⁹ M, about 210×10⁻⁹ M, about 220×10⁻⁹ M, about 230×10⁻⁹ M, about 240×10⁻⁹ M, about 250×10⁻⁹ M, about 260×10⁻⁹ M, about 270×10⁻⁹ M, about 280×10⁻⁹ M, about 290×10⁻⁹ M, about 300×10⁻⁹ M, about 310×10⁻⁹ M, about 320×10⁻⁹ M, about 330×10⁻⁹ M, about 340×10⁻⁹ M, about 350×10⁻⁹ M, about 360×10⁻⁹ M, about 370×10⁻⁹ M, about 380×10⁻⁹ M, about 390×10⁻⁹ M, about 400×10⁻⁹ M, about 410×10⁻⁹ M, about 420×10⁻⁹ M, about 430×10⁻⁹ M, about 440×10⁻⁹ M, about 450×10⁻⁹ M, about 460×10⁻⁹ M, about 470×10⁻⁹ M, about 480×10⁻⁹ M, about 490×10⁻⁹ M, about 400×10⁻⁹ M, about 510×10⁻⁹ M, about 520×10⁻⁹ M, about 530×10⁻⁹ M, about 540×10⁻⁹ M, about 550×10⁻⁹ M, about 560×10⁻⁹ M, about 570×10⁻⁹ M, about 580×10⁻⁹ M, about 590×10⁻⁹ M, about 600×10⁻⁹ M, about 610×10⁻⁹ M, about 620×10⁻⁹ M, about 630×10⁻⁹ M, about 640×10⁻⁹ M, about 650×10⁻⁹ M, about 660×10⁻⁹ M, about 670×10⁻⁹ M, about 680×10⁻⁹ M, about 690×10⁻⁹ M, about 700×10⁻⁹ M, about 710×10⁻⁹ M, about 720×10⁻⁹ M, about 730×10⁻⁹ M, about 740×10⁻⁹ M, about 750×10⁻⁹ M, about 760×10⁻⁹ M, about 770×10⁻⁹ M, about 780×10⁻⁹ M, about 790×10⁻⁹ M, about 800×10⁻⁹ M, about 810×10⁻⁹ M, about 820×10⁻⁹ M, about 830×10⁻⁹ M, about 840×10⁻⁹ M, about 850×10⁻⁹ M, about 860×10⁻⁹ M, about 870×10⁻⁹ M, about 880×10⁻⁹ M, about 890×10⁻⁹ M, about 900×10⁻⁹ M, about 910×10⁻⁹ M, about 920×10⁻⁹ M, about 930×10⁻⁹ M, about 940×10⁻⁹ M, about 950×10⁻⁹ M, about 960×10⁻⁹ M, about 970×10⁻⁹ M, about 980×10⁻⁹ M, about 990×10⁻⁹ M, or about 1,000×10⁻⁹ M.

[0158] In some embodiments, the third antigen binding domain specifically binds the antigen expressed by the undesired cell with the K_{D} of about 5×10⁻⁸ M or less, such as about 1×10⁻⁸ M or less, about 5×10⁻⁹ M or less, about 1×10⁻⁹ M or less, about 5×10⁻¹° M or less, about 1×10⁻¹° M or less, about 5×10⁻¹¹ M or less, about 1×10⁻¹¹ M or less, about 5×10⁻¹² M or less, about 1×10⁻¹² M or less, about 5×10⁻¹³ M or less, about 1×10⁻¹³ M or less, about 5×10⁻¹⁴ M or less, about 1×10⁻¹⁴ M or less, about 5×10⁻¹⁵ M or less or about 1×10⁻¹⁵ M or less.

[0159] In some embodiments, the third antigen binding domain specifically binds the antigen expressed by the undesired cell with the K_{D} of from about 5×10⁻⁸ M to about 1×10⁻¹⁵ M. In some embodiments, the third antigen binding domain specifically binds the antigen expressed by the undesired cell with the K_{D} of from about 1×10⁻⁹ M to about 1×10¹⁵ M. In some embodiments, the third antigen binding domain specifically binds the antigen expressed by the undesired cell with the K_{D} of from about 5×10⁻¹° M to about 1×10⁻¹⁵ M. In some embodiments, the third antigen binding domain specifically binds the antigen expressed by the undesired cell with the K_{D} of from about 1×10⁻¹° M to about 1×10¹⁵ M. In some embodiments, the third antigen binding domain specifically binds the antigen expressed by the undesired cell with the K_{D} of from about 5×10⁻¹¹ M to about 1×10¹⁵ M. In some embodiments, the third antigen binding domain specifically binds the antigen expressed by the undesired cell with the K_{D} of from about 1×10⁻¹¹ M to about 1×10⁻¹⁵ M.

[0160] In some embodiments, the third antigen binding domain specifically binds the antigen expressed by the undesired cell with the K_{D} of about 5×10⁻⁸ M, such as about 1×10⁻⁸ M, about 5×10⁻⁹ M, about 1×10⁻⁹ M, about 5×10⁻¹° M, about 1×10⁻¹° M, about 5×10⁻¹¹ M, about 1×10⁻¹¹ M, about 5×10⁻¹² M, about 1×10⁻¹² M, about 5×10⁻¹³ M, about 1×10⁻¹³ M, about 5×10⁻¹⁴ M, about 1×10⁻¹⁴ M, about 5×10⁻¹⁵ M, or about 1×10⁻¹⁵ M.

[0161] In some embodiments, the first antigen binding domain specifically binds CD8 with the K_{D} of from about 0.1×10⁻⁹ M to about 1,000×10⁻⁹ M and the second antigen binding domain specifically binds the TCR complex with the K_{D} of from about 50×10⁻⁹ M to about 1,000×10⁻⁹ M. In some embodiments, the first antigen binding domain specifically binds CD8 with the K_{D} of from about 0.5×10⁻⁹ M to about 500×10⁻⁹ M and the second antigen binding domain specifically binds the TCR complex with the K_{D} of from about 50×10⁻⁹ M to about 500×10⁻⁹ M. In some embodiments, the first antigen binding domain specifically binds CD8 with the K_{D} of from about 1×10⁻⁹ M to about 500×10⁻⁹ M and the second antigen binding domain specifically binds the TCR complex with the K_{D} of from about 100×10⁻⁹ M to about 500×10⁻⁹ M.

[0162] In some embodiments, the first antigen binding domain specifically binds CD8 with the K_{D} about 0.5×10⁻⁹ M or higher and the second antigen binding domain specifically binds the TCR complex with the K_{D} of about 50×10⁻⁹ M or higher. In some embodiments, the first antigen binding domain specifically binds CD8 with the K_{D} about 1×10⁻⁹ M or higher and the second antigen binding domain specifically binds the TCR complex with the K_{D} of about 100×10⁻⁹ M or higher.

[0163] In some embodiments, the first antigen binding domain specifically binds CD8 with the K_{D} of from about 0.1×10⁻⁹ M to about 1,000×10⁻⁹ M, the second antigen binding domain specifically binds the TCR complex with the K_{D} of from about 50×10⁻⁹ M to about 1,000×10⁻⁹ M, and the third antigen binding domain specifically binds the antigen expressed by the undesired cell with the K_{D} of from about 5×10⁻⁸ M to about 1×10⁻¹⁵ M. In some embodiments, the first antigen binding domain specifically binds CD8 with the K_{D} of from about 0.5×10⁻⁹ M to about 500×10⁻⁹ M, the second antigen binding domain specifically binds the TCR complex with the K_{D} of from about 50×10⁻⁹ M to about 500×10⁻⁹ M, and the third antigen binding domain specifically binds the antigen expressed by the undesired cell with the K_{D} of from about 1×10⁻⁹ M to about 1×10¹⁵ M. In some embodiments, the first antigen binding domain specifically binds CD8 with the K_{D} of from about 1×10⁻⁹ M to about 500×10⁻⁹ M, the second antigen binding domain specifically binds the TCR complex with the K_{D} of from about 100×10⁻⁹ M to about 500×10⁻⁹ M, and the third antigen binding domain specifically binds the antigen expressed by the undesired cell with the K_{D} of from about 1×10¹⁰ M to about 1×10⁻¹⁵ M.

[0164] In some embodiments, the first antigen binding domain specifically binds CD8 with the K_{D} about 0.5×10⁻⁹ M or higher, the second antigen binding domain specifically binds the TCR complex with the K_{D} of about 50×10⁻⁹ M or higher, and the third antigen binding domain specifically binds the antigen expressed by the undesired cell with the K_{D} of about 1×10⁻⁸ M or less. In some embodiments, the first antigen binding domain specifically binds CD8 with the K_{D} about 1×10⁻⁹ M or higher, the second antigen binding domain specifically binds the TCR complex with the K_{D} of about 100×10⁻⁹ M or higher, and the third antigen binding domain specifically binds the antigen expressed by the undesired cell with the K_{D} of about 1×10⁻⁹ M or less.

[0165] In some embodiments, the first antigen binding domain comprises a scFv, a Fab, a Fab′, a F(ab′)₂, a Fd, a Fv, a domain antibody (dAb), a VHH domain, a VH, a VL, a non-antibody scaffold, or fragments thereof. In some embodiments, the second antigen binding domain comprises a scFv, a Fab, a Fab′, a F(ab′)₂, a Fd, a Fv, a dAb, a VHH domain, a VH, a VL, a non-antibody scaffold, or fragments thereof. In some embodiments, the third antigen binding domain comprises a scFv, a Fab, a Fab′, a F(ab′)₂, a Fd, a Fv, a dAb, a VHH domain, a VH, a VL, a non-antibody scaffold, or fragments thereof.

[0166] In some embodiments, the first antigen binding domain comprises a scFv. In some embodiments, the first antigen binding domain comprises a Fab. In some embodiments, the first antigen binding domain comprises a Fab′. In some embodiments, the first antigen binding domain comprises a F(ab′)₂. In some embodiments, the first antigen binding domain comprises a Fd. In some embodiments, the first antigen binding domain comprises a Fv. In some embodiments, the first antigen binding domain comprises a dAb. In some embodiments, the first antigen binding domain comprises a VHH. In some embodiments, the first antigen binding domain comprises a VH. In some embodiments, the first antigen binding domain comprises a VL. In some embodiments, the first antigen binding domain comprises a non-antibody scaffold. In some embodiments, the second antigen binding domain comprises a scFv. In some embodiments, the second antigen binding domain comprises a Fab. In some embodiments, the second antigen binding domain comprises a Fab′. In some embodiments, the second antigen binding domain comprises a F(ab′)₂. In some embodiments, the second antigen binding domain comprises a Fd. In some embodiments, the second antigen binding domain comprises a Fv. In some embodiments, the second antigen binding domain comprises a dAb. In some embodiments, the second antigen binding domain comprises a VHH. In some embodiments, the second antigen binding domain comprises a VH. In some embodiments, the second antigen binding domain comprises a VL. In some embodiments, the second antigen binding domain comprises a non-antibody scaffold. In some embodiments, the third antigen binding domain comprises a scFv. In some embodiments, the third antigen binding domain comprises a Fab. In some embodiments, the third antigen binding domain comprises a Fab′. In some embodiments, the third antigen binding domain comprises a F(ab′)₂. In some embodiments, the third antigen binding domain comprises a Fd. In some embodiments, the third antigen binding domain comprises a Fv. In some embodiments, the third antigen binding domain comprises a dAb. In some embodiments, the third antigen binding domain comprises a VHH. In some embodiments, the third antigen binding domain comprises a VH. In some embodiments, the third antigen binding domain comprises a VL. In some embodiments, the third antigen binding domain comprises a non-antibody scaffold. In some embodiments, the first antigen binding domain comprises a scFv, the second antigen binding domain comprises a scFv and the third antigen binding domain comprises a Fab.

[0167] The disclosure also provides an isolated molecule, comprising: a first polypeptide, a second polypeptide and a third polypeptide, wherein the first polypeptide comprises, from N- to C-terminus, a second antigen binding domain comprising a scFv that specifically binds a TCR complex, a VH that is capable of specifically binding CD8, a CH1 domain, a hinge, a CH2 domain and a CH3 domain; the second polypeptide comprises, from N- to C-terminus, a VL that is capable of specifically binding CD8 and a CL domain; and the third polypeptide comprises, from N- to C-terminus, a third antigen binding domain comprising a scFv that specifically binds an antigen expressed by an undesired cell and a Fc or a fragment of the Fc.

[0168] The disclosure also provides an isolated molecule, comprising a first polypeptide, a second polypeptide and a third polypeptide, wherein the first polypeptide comprises, from N- to C-terminus, a VH that is capable of specifically binding CD8, a CH1 domain, a hinge, a CH2 domain and a CH3 domain; the second polypeptide comprises, from N- to C-terminus, a VL that is capable of specifically binding CD8, a CL domain and a second antigen binding domain comprising a scFv that specifically binds a TCR complex; and the third polypeptide comprises, from N- to C-terminus, a third antigen binding domain comprising a scFv that specifically binds an antigen expressed by an undesired cell and a Fc or a fragment of the Fc.

[0169] The disclosure also provides an isolated molecule, comprising: a first polypeptide, a second polypeptide and a third polypeptide, wherein the first polypeptide comprises, from N- to C-terminus, a VH that is capable of specifically CD8, a CH1 domain, a hinge, a CH2 domain, a CH3 domain and a second antigen binding domain comprising a scFv that specifically binds a TCR complex; the second polypeptide comprises, from N- to C-terminus, a VL that is capable of specifically binding CD8 and a CL domain; and the third polypeptide comprises, from N- to C-terminus, a third antigen binding domain comprising a scFv that specifically binds an antigen expressed by an undesired cell and a Fc or a fragment of the Fc.

[0170] “Capable of specifically binding” in the context of CD8 refers to VH and VL which specifically bind CD8 when they associate to form an antigen binding domain. The VH that is capable of specifically binding CD8 may specifically bind CD8 in the absence of the VL in instances when most paratope residues reside in the VH.

[0171] In some embodiments, first antigen binding domain comprising the Fab, the second antigen binding domain comprising the scFv or the third antigen binding domain comprising the scFv is conjugated to the Fc or the fragment of the Fc, to the VH that is capable of specifically biding CD8, to the CL domain or to the CH3 domain via a linker.

[0172] In some embodiments, the linker comprises a polypeptide having an amino acid sequence of any one of SEQ ID NOs: 2183-2290.

[0173] In some embodiments, the fragment of the Fc comprises a CH2 domain and a CH3 domain.

[0174] In some embodiments, the CH3 domain comprises one or more substitutions when compared to a wild-type CH3 domain. An exemplary wild-type CH3 domain is an IgG1 CH3 domain having the amino acid sequence of SEQ ID NO: 2319.

[0175] In some embodiments, the one or more substitutions comprise T350V, L351Y, F405A, Y407V, T366Y, T366W, F405W, T394W, T394S, Y407T, Y407A, T366S/L368A/Y407V, L351Y/F405A/Y407V, T366A/K392M/T394W, F405A/Y407V, T366L/K392M/T394W, L351Y/Y407A, T366A/K409F, L351Y/Y407A, T366V/K409F, T366A/K409F, T350V/L351Y/F405A/Y407V or T350V/T366L/K392L/T394W, wherein residue numbering is according to the EU index.

[0176] In some embodiments, the Fc, the CH2 domain or the CH3 domain is an IgG1 isotype. In some embodiments, the Fc, the CH2 domain or the CH3 domain is an IgG2 isotype. In some embodiments, the Fc, the CH2 domain or the CH3 domain is an IgG3 isotype. In some embodiments, the Fc, the CH2 domain or the CH3 domain is an IgG4 isotype.

[0177] In some embodiments, the second antigen binding domain specifically binds CD3, TCRα chain, TCRβ chain, TCRγ chain or TCRδ chain, or any combination thereof. In some embodiments, the second antigen binding domain specifically binds CD3. In some embodiments, the second antigen binding domain specifically binds CD3ε. In some embodiments, the second antigen binding domain specifically binds TCRα chain. In some embodiments, the second antigen binding domain specifically binds TCRβ chain. In some embodiments, the second antigen binding domain specifically binds TCRγ chain. In some embodiments, the second antigen binding domain specifically binds TCRδ chain.

[0178] In some embodiments, the TCRβ chain comprises TCRVB17.

[0179] In some embodiments, CD3 comprises CD3ε, CD3γ, CD3δ or CD3ζ. In some embodiments, CD3 comprises CD3ε. In some embodiments, CD3 comprises CD3γ. In some embodiments, CD3 comprises CD3δ. In some embodiments, CD3 comprises CD3ζ.

[0180] In some embodiments, the TCR complex and the CD8 are from a mammal. In some embodiments, the TCR complex and the CD8 are from a rodent. In some embodiments, the TCR complex and the CD8 are from a human. In some embodiments, the TCR complex and the CD8 are from a monkey. In some embodiments, the TCR complex and the CD8 are from a dog. In some embodiments, the TCR complex and the CD8 are from a rat. In some embodiments, the TCR complex and the CD8 are from a mouse.

[0181] In some embodiments, the first antigen binding domain that specifically binds CD8 comprises the HCDR1 of SEQ ID NO: 2307, the HCDR2 of SEQ ID NO: 2308, the HCDR3 of SEQ ID NO: 2309, the LCDR1 of SEQ ID NO: 2310, the LCDR2 of SEQ ID NO: 2311 and the LCDR3 of SEQ ID NO: 2312.

[0182] In some embodiments, the first antigen binding domain that specifically binds CD8 comprises the VH of SEQ ID NO: 2313 and the VL of SEQ ID NO: 2314.

[0183] In some embodiments, the first antigen binding domain that specifically binds CD8 comprises: (i) a VH comprising a VH CDR1, a VH CDR2, and a VH CDR3 having an amino acid sequence of a VH CDR1, a VH CDR2, and a VH CDR3, respectively, of a VH having an amino acid sequence of SEQ ID NO:31; and (ii) a VL comprising a VL CDR1, a VL CDR2, and a VL CDR3 having an amino acid sequence of a VL CDR1, a VL CDR2, and a VL CDR3, respectively, of a VL having an amino acid sequence of SEQ ID NO:32. In some embodiments, the first antigen binding domain that specifically binds CD8 comprises: (i) a VH comprising a VH CDR1, a VH CDR2, and a VH CDR3 having an amino acid sequence of a VH CDR1, a VH CDR2, and a VH CDR3, respectively, of a VH having an amino acid sequence of SEQ ID NO:65; and (ii) a VL comprising a VL CDR1, a VL CDR2, and a VL CDR3 having an amino acid sequence of a VL CDR1, a VL CDR2, and a VL CDR3, respectively, of a VL having an amino acid sequence of SEQ ID NO:66. In some embodiments, the first antigen binding domain that specifically binds CD8 comprises: (i) a VH comprising a VH CDR1, a VH CDR2, and a VH CDR3 having an amino acid sequence of a VH CDR1, a VH CDR2, and a VH CDR3, respectively, of a VH having an amino acid sequence of SEQ ID NO:99; and (ii) a VL comprising a VL CDR1, a VL CDR2, and a VL CDR3 having an amino acid sequence of a VL CDR1, a VL CDR2, and a VL CDR3, respectively, of a VL having an amino acid sequence of SEQ ID NO:100. In some embodiments, the first antigen binding domain that specifically binds CD8 comprises: (i) a VH comprising a VH CDR1, a VH CDR2, and a VH CDR3 having an amino acid sequence of a VH CDR1, a VH CDR2, and a VH CDR3, respectively, of a VH having an amino acid sequence of SEQ ID NO:133; and (ii) a VL comprising a VL CDR1, a VL CDR2, and a VL CDR3 having an amino acid sequence of a VL CDR1, a VL CDR2, and a VL CDR3, respectively, of a VL having an amino acid sequence of SEQ ID NO:134. In some embodiments, the first antigen binding domain that specifically binds CD8 comprises: (i) a VH comprising a VH CDR1, a VH CDR2, and a VH CDR3 having an amino acid sequence of a VH CDR1, a VH CDR2, and a VH CDR3, respectively, of a VH having an amino acid sequence of SEQ ID NO:167; and (ii) a VL comprising a VL CDR1, a VL CDR2, and a VL CDR3 having an amino acid sequence of a VL CDR1, a VL CDR2, and a VL CDR3, respectively, of a VL having an amino acid sequence of SEQ ID NO:168. In some embodiments, the first antigen binding domain that specifically binds CD8 comprises: (i) a VH comprising a VH CDR1, a VH CDR2, and a VH CDR3 having an amino acid sequence of a VH CDR1, a VH CDR2, and a VH CDR3, respectively, of a VH having an amino acid sequence of SEQ ID NO:201; and (ii) a VL comprising a VL CDR1, a VL CDR2, and a VL CDR3 having an amino acid sequence of a VL CDR1, a VL CDR2, and a VL CDR3, respectively, of a VL having an amino acid sequence of SEQ ID NO:202. In some embodiments, the first antigen binding domain that specifically binds CD8 comprises: (i) a VH comprising a VH CDR1, a VH CDR2, and a VH CDR3 having an amino acid sequence of a VH CDR1, a VH CDR2, and a VH CDR3, respectively, of a VH having an amino acid sequence of SEQ ID NO:235; and (ii) a VL comprising a VL CDR1, a VL CDR2, and a VL CDR3 having an amino acid sequence of a VL CDR1, a VL CDR2, and a VL CDR3, respectively, of a VL having an amino acid sequence of SEQ ID NO:236. In some embodiments, the first antigen binding domain that specifically binds CD8 comprises: (i) a VH comprising a VH CDR1, a VH CDR2, and a VH CDR3 having an amino acid sequence of a VH CDR1, a VH CDR2, and a VH CDR3, respectively, of a VH having an amino acid sequence of SEQ ID NO:269; and (ii) a VL comprising a VL CDR1, a VL CDR2, and a VL CDR3 having an amino acid sequence of a VL CDR1, a VL CDR2, and a VL CDR3, respectively, of a VL having an amino acid sequence of SEQ ID NO:270. In some embodiments, the first antigen binding domain that specifically binds CD8 comprises: (i) a VH comprising a VH CDR1, a VH CDR2, and a VH CDR3 having an amino acid sequence of a VH CDR1, a VH CDR2, and a VH CDR3, respectively, of a VH having an amino acid sequence of SEQ ID NO:303; and (ii) a VL comprising a VL CDR1, a VL CDR2, and a VL CDR3 having an amino acid sequence of a VL CDR1, a VL CDR2, and a VL CDR3, respectively, of a VL having an amino acid sequence of SEQ ID NO:304. In some embodiments, the first antigen binding domain that specifically binds CD8 comprises: (i) a VH comprising a VH CDR1, a VH CDR2, and a VH CDR3 having an amino acid sequence of a VH CDR1, a VH CDR2, and a VH CDR3, respectively, of a VH having an amino acid sequence of SEQ ID NO:337; and (ii) a VL comprising a VL CDR1, a VL CDR2, and a VL CDR3 having an amino acid sequence of a VL CDR1, a VL CDR2, and a VL CDR3, respectively, of a VL having an amino acid sequence of SEQ ID NO:338. In some embodiments, the first antigen binding domain that specifically binds CD8 comprises: (i) a VH comprising a VH CDR1, a VH CDR2, and a VH CDR3 having an amino acid sequence of a VH CDR1, a VH CDR2, and a VH CDR3, respectively, of a VH having an amino acid sequence of SEQ ID NO:371; and (ii) a VL comprising a VL CDR1, a VL CDR2, and a VL CDR3 having an amino acid sequence of a VL CDR1, a VL CDR2, and a VL CDR3, respectively, of a VL having an amino acid sequence of SEQ ID NO:372. In some embodiments, the first antigen binding domain that specifically binds CD8 comprises: (i) a VH comprising a VH CDR1, a VH CDR2, and a VH CDR3 having an amino acid sequence of a VH CDR1, a VH CDR2, and a VH CDR3, respectively, of a VH having an amino acid sequence of SEQ ID NO:405; and (ii) a VL comprising a VL CDR1, a VL CDR2, and a VL CDR3 having an amino acid sequence of a VL CDR1, a VL CDR2, and a VL CDR3, respectively, of a VL having an amino acid sequence of SEQ ID NO:406. In some embodiments, the first antigen binding domain that specifically binds CD8 comprises: (i) a VH comprising a VH CDR1, a VH CDR2, and a VH CDR3 having an amino acid sequence of a VH CDR1, a VH CDR2, and a VH CDR3, respectively, of a VH having an amino acid sequence of SEQ ID NO:439; and (ii) a VL comprising a VL CDR1, a VL CDR2, and a VL CDR3 having an amino acid sequence of a VL CDR1, a VL CDR2, and a VL CDR3, respectively, of a VL having an amino acid sequence of SEQ ID NO:440. In some embodiments, the first antigen binding domain that specifically binds CD8 comprises: (i) a VH comprising a VH CDR1, a VH CDR2, and a VH CDR3 having an amino acid sequence of a VH CDR1, a VH CDR2, and a VH CDR3, respectively, of a VH having an amino acid sequence of SEQ ID NO:473; and (ii) a VL comprising a VL CDR1, a VL CDR2, and a VL CDR3 having an amino acid sequence of a VL CDR1, a VL CDR2, and a VL CDR3, respectively, of a VL having an amino acid sequence of SEQ ID NO:474. In some embodiments, the first antigen binding domain that specifically binds CD8 comprises: (i) a VH comprising a VH CDR1, a VH CDR2, and a VH CDR3 having an amino acid sequence of a VH CDR1, a VH CDR2, and a VH CDR3, respectively, of a VH having an amino acid sequence of SEQ ID NO:507; and (ii) a VL comprising a VL CDR1, a VL CDR2, and a VL CDR3 having an amino acid sequence of a VL CDR1, a VL CDR2, and a VL CDR3, respectively, of a VL having an amino acid sequence of SEQ ID NO:508. In some embodiments, the first antigen binding domain that specifically binds CD8 comprises: (i) a VH comprising a VH CDR1, a VH CDR2, and a VH CDR3 having an amino acid sequence of a VH CDR1, a VH CDR2, and a VH CDR3, respectively, of a VH having an amino acid sequence of SEQ ID NO:541; and (ii) a VL comprising a VL CDR1, a VL CDR2, and a VL CDR3 having an amino acid sequence of a VL CDR1, a VL CDR2, and a VL CDR3, respectively, of a VL having an amino acid sequence of SEQ ID NO:542. In some embodiments, the first antigen binding domain that specifically binds CD8 comprises: (i) a VH comprising a VH CDR1, a VH CDR2, and a VH CDR3 having an amino acid sequence of a VH CDR1, a VH CDR2, and a VH CDR3, respectively, of a VH having an amino acid sequence of SEQ ID NO:575; and (ii) a VL comprising a VL CDR1, a VL CDR2, and a VL CDR3 having an amino acid sequence of a VL CDR1, a VL CDR2, and a VL CDR3, respectively, of a VL having an amino acid sequence of SEQ ID NO:576. In some embodiments, the first antigen binding domain that specifically binds CD8 comprises: (i) a VH comprising a VH CDR1, a VH CDR2, and a VH CDR3 having an amino acid sequence of a VH CDR1, a VH CDR2, and a VH CDR3, respectively, of a VH having an amino acid sequence of SEQ ID NO:609; and (ii) a VL comprising a VL CDR1, a VL CDR2, and a VL CDR3 having an amino acid sequence of a VL CDR1, a VL CDR2, and a VL CDR3, respectively, of a VL having an amino acid sequence of SEQ ID NO:610. In some embodiments, the first antigen binding domain that specifically binds CD8 comprises: (i) a VH comprising a VH CDR1, a VH CDR2, and a VH CDR3 having an amino acid sequence of a VH CDR1, a VH CDR2, and a VH CDR3, respectively, of a VH having an amino acid sequence of SEQ ID NO:643; and (ii) a VL comprising a VL CDR1, a VL CDR2, and a VL CDR3 having an amino acid sequence of a VL CDR1, a VL CDR2, and a VL CDR3, respectively, of a VL having an amino acid sequence of SEQ ID NO:644. In some embodiments, the first antigen binding domain that specifically binds CD8 comprises: (i) a VH comprising a VH CDR1, a VH CDR2, and a VH CDR3 having an amino acid sequence of a VH CDR1, a VH CDR2, and a VH CDR3, respectively, of a VH having an amino acid sequence of SEQ ID NO:677; and (ii) a VL comprising a VL CDR1, a VL CDR2, and a VL CDR3 having an amino acid sequence of a VL CDR1, a VL CDR2, and a VL CDR3, respectively, of a VL having an amino acid sequence of SEQ ID NO:678. In some embodiments, the first antigen binding domain that specifically binds CD8 comprises: (i) a VH comprising a VH CDR1, a VH CDR2, and a VH CDR3 having an amino acid sequence of a VH CDR1, a VH CDR2, and a VH CDR3, respectively, of a VH having an amino acid sequence of SEQ ID NO:711; and (ii) a VL comprising a VL CDR1, a VL CDR2, and a VL CDR3 having an amino acid sequence of a VL CDR1, a VL CDR2, and a VL CDR3, respectively, of a VL having an amino acid sequence of SEQ ID NO:712. In some embodiments, the first antigen binding domain that specifically binds CD8 comprises: (i) a VH comprising a VH CDR1, a VH CDR2, and a VH CDR3 having an amino acid sequence of a VH CDR1, a VH CDR2, and a VH CDR3, respectively, of a VH having an amino acid sequence of SEQ ID NO:745; and (ii) a VL comprising a VL CDR1, a VL CDR2, and a VL CDR3 having an amino acid sequence of a VL CDR1, a VL CDR2, and a VL CDR3, respectively, of a VL having an amino acid sequence of SEQ ID NO:746. In some embodiments, the first antigen binding domain that specifically binds CD8 comprises: (i) a VH comprising a VH CDR1, a VH CDR2, and a VH CDR3 having an amino acid sequence of a VH CDR1, a VH CDR2, and a VH CDR3, respectively, of a VH having an amino acid sequence of SEQ ID NO:779; and (ii) a VL comprising a VL CDR1, a VL CDR2, and a VL CDR3 having an amino acid sequence of a VL CDR1, a VL CDR2, and a VL CDR3, respectively, of a VL having an amino acid sequence of SEQ ID NO:780. In some embodiments, the first antigen binding domain that specifically binds CD8 comprises: (i) a VH comprising a VH CDR1, a VH CDR2, and a VH CDR3 having an amino acid sequence of a VH CDR1, a VH CDR2, and a VH CDR3, respectively, of a VH having an amino acid sequence of SEQ ID NO:813; and (ii) a VL comprising a VL CDR1, a VL CDR2, and a VL CDR3 having an amino acid sequence of a VL CDR1, a VL CDR2, and a VL CDR3, respectively, of a VL having an amino acid sequence of SEQ ID NO:814. In some embodiments, the first antigen binding domain that specifically binds CD8 comprises: (i) a VH comprising a VH CDR1, a VH CDR2, and a VH CDR3 having an amino acid sequence of a VH CDR1, a VH CDR2, and a VH CDR3, respectively, of a VH having an amino acid sequence of SEQ ID NO:847; and (ii) a VL comprising a VL CDR1, a VL CDR2, and a VL CDR3 having an amino acid sequence of a VL CDR1, a VL CDR2, and a VL CDR3, respectively, of a VL having an amino acid sequence of SEQ ID NO:848. In some embodiments, the first antigen binding domain that specifically binds CD8 comprises: (i) a VH comprising a VH CDR1, a VH CDR2, and a VH CDR3 having an amino acid sequence of a VH CDR1, a VH CDR2, and a VH CDR3, respectively, of a VH having an amino acid sequence of SEQ ID NO:881; and (ii) a VL comprising a VL CDR1, a VL CDR2, and a VL CDR3 having an amino acid sequence of a VL CDR1, a VL CDR2, and a VL CDR3, respectively, of a VL having an amino acid sequence of SEQ ID NO:882. In some embodiments, the first antigen binding domain that specifically binds CD8 comprises: (i) a VH comprising a VH CDR1, a VH CDR2, and a VH CDR3 having an amino acid sequence of a VH CDR1, a VH CDR2, and a VH CDR3, respectively, of a VH having an amino acid sequence of SEQ ID NO:915; and (ii) a VL comprising a VL CDR1, a VL CDR2, and a VL CDR3 having an amino acid sequence of a VL CDR1, a VL CDR2, and a VL CDR3, respectively, of a VL having an amino acid sequence of SEQ ID NO:916. In some embodiments, the first antigen binding domain that specifically binds CD8 comprises: (i) a VH comprising a VH CDR1, a VH CDR2, and a VH CDR3 having an amino acid sequence of a VH CDR1, a VH CDR2, and a VH CDR3, respectively, of a VH having an amino acid sequence of SEQ ID NO:949; and (ii) a VL comprising a VL CDR1, a VL CDR2, and a VL CDR3 having an amino acid sequence of a VL CDR1, a VL CDR2, and a VL CDR3, respectively, of a VL having an amino acid sequence of SEQ ID NO:950. In some embodiments, the first antigen binding domain that specifically binds CD8 comprises: (i) a VH comprising a VH CDR1, a VH CDR2, and a VH CDR3 having an amino acid sequence of a VH CDR1, a VH CDR2, and a VH CDR3, respectively, of a VH having an amino acid sequence of SEQ ID NO:983; and (ii) a VL comprising a VL CDR1, a VL CDR2, and a VL CDR3 having an amino acid sequence of a VL CDR1, a VL CDR2, and a VL CDR3, respectively, of a VL having an amino acid sequence of SEQ ID NO:984. In some embodiments, the first antigen binding domain that specifically binds CD8 comprises: (i) a VH comprising a VH CDR1, a VH CDR2, and a VH CDR3 having an amino acid sequence of a VH CDR1, a VH CDR2, and a VH CDR3, respectively, of a VH having an amino acid sequence of SEQ ID NO:1017; and (ii) a VL comprising a VL CDR1, a VL CDR2, and a VL CDR3 having an amino acid sequence of a VL CDR1, a VL CDR2, and a VL CDR3, respectively, of a VL having an amino acid sequence of SEQ ID NO:1018. In some embodiments, the first antigen binding domain that specifically binds CD8 comprises: (i) a VH comprising a VH CDR1, a VH CDR2, and a VH CDR3 having an amino acid sequence of a VH CDR1, a VH CDR2, and a VH CDR3, respectively, of a VH having an amino acid sequence of SEQ ID NO:1051; and (ii) a VL comprising a VL CDR1, a VL CDR2, and a VL CDR3 having an amino acid sequence of a VL CDR1, a VL CDR2, and a VL CDR3, respectively, of a VL having an amino acid sequence of SEQ ID NO:1052. In some embodiments, the first antigen binding domain that specifically binds CD8 comprises: (i) a VH comprising a VH CDR1, a VH CDR2, and a VH CDR3 having an amino acid sequence of a VH CDR1, a VH CDR2, and a VH CDR3, respectively, of a VH having an amino acid sequence of SEQ ID NO:1085; and (ii) a VL comprising a VL CDR1, a VL CDR2, and a VL CDR3 having an amino acid sequence of a VL CDR1, a VL CDR2, and a VL CDR3, respectively, of a VL having an amino acid sequence of SEQ ID NO:1086. In some embodiments, the first antigen binding domain that specifically binds CD8 comprises: (i) a VH comprising a VH CDR1, a VH CDR2, and a VH CDR3 having an amino acid sequence of a VH CDR1, a VH CDR2, and a VH CDR3, respectively, of a VH having an amino acid sequence of SEQ ID NO:1119; and (ii) a VL comprising a VL CDR1, a VL CDR2, and a VL CDR3 having an amino acid sequence of a VL CDR1, a VL CDR2, and a VL CDR3, respectively, of a VL having an amino acid sequence of SEQ ID NO:1120. In some embodiments, the first antigen binding domain that specifically binds CD8 comprises: (i) a VH comprising a VH CDR1, a VH CDR2, and a VH CDR3 having an amino acid sequence of a VH CDR1, a VH CDR2, and a VH CDR3, respectively, of a VH having an amino acid sequence of SEQ ID NO:1153; and (ii) a VL comprising a VL CDR1, a VL CDR2, and a VL CDR3 having an amino acid sequence of a VL CDR1, a VL CDR2, and a VL CDR3, respectively, of a VL having an amino acid sequence of SEQ ID NO:1154. In some embodiments, the first antigen binding domain that specifically binds CD8 comprises: (i) a VH comprising a VH CDR1, a VH CDR2, and a VH CDR3 having an amino acid sequence of a VH CDR1, a VH CDR2, and a VH CDR3, respectively, of a VH having an amino acid sequence of SEQ ID NO:1187; and (ii) a VL comprising a VL CDR1, a VL CDR2, and a VL CDR3 having an amino acid sequence of a VL CDR1, a VL CDR2, and a VL CDR3, respectively, of a VL having an amino acid sequence of SEQ ID NO:1188. In some embodiments, the first antigen binding domain that specifically binds CD8 comprises: (i) a VH comprising a VH CDR1, a VH CDR2, and a VH CDR3 having an amino acid sequence of a VH CDR1, a VH CDR2, and a VH CDR3, respectively, of a VH having an amino acid sequence of SEQ ID NO:1221; and (ii) a VL comprising a VL CDR1, a VL CDR2, and a VL CDR3 having an amino acid sequence of a VL CDR1, a VL CDR2, and a VL CDR3, respectively, of a VL having an amino acid sequence of SEQ ID NO:1222. In some embodiments, the first antigen binding domain that specifically binds CD8 comprises: (i) a VH comprising a VH CDR1, a VH CDR2, and a VH CDR3 having an amino acid sequence of a VH CDR1, a VH CDR2, and a VH CDR3, respectively, of a VH having an amino acid sequence of SEQ ID NO:1255; and (ii) a VL comprising a VL CDR1, a VL CDR2, and a VL CDR3 having an amino acid sequence of a VL CDR1, a VL CDR2, and a VL CDR3, respectively, of a VL having an amino acid sequence of SEQ ID NO:1256. In some embodiments, the first antigen binding domain that specifically binds CD8 comprises: (i) a VH comprising a VH CDR1, a VH CDR2, and a VH CDR3 having an amino acid sequence of a VH CDR1, a VH CDR2, and a VH CDR3, respectively, of a VH having an amino acid sequence of SEQ ID NO:1289; and (ii) a VL comprising a VL CDR1, a VL CDR2, and a VL CDR3 having an amino acid sequence of a VL CDR1, a VL CDR2, and a VL CDR3, respectively, of a VL having an amino acid sequence of SEQ ID NO:1290. In some embodiments, the first antigen binding domain that specifically binds CD8 comprises: (i) a VH comprising a VH CDR1, a VH CDR2, and a VH CDR3 having an amino acid sequence of a VH CDR1, a VH CDR2, and a VH CDR3, respectively, of a VH having an amino acid sequence of SEQ ID NO:1323; and (ii) a VL comprising a VL CDR1, a VL CDR2, and a VL CDR3 having an amino acid sequence of a VL CDR1, a VL CDR2, and a VL CDR3, respectively, of a VL having an amino acid sequence of SEQ ID NO:1324. In some embodiments, the first antigen binding domain that specifically binds CD8 comprises: (i) a VH comprising a VH CDR1, a VH CDR2, and a VH CDR3 having an amino acid sequence of a VH CDR1, a VH CDR2, and a VH CDR3, respectively, of a VH having an amino acid sequence of SEQ ID NO:1357; and (ii) a VL comprising a VL CDR1, a VL CDR2, and a VL CDR3 having an amino acid sequence of a VL CDR1, a VL CDR2, and a VL CDR3, respectively, of a VL having an amino acid sequence of SEQ ID NO:1358. In some embodiments, the first antigen binding domain that specifically binds CD8 comprises: (i) a VH comprising a VH CDR1, a VH CDR2, and a VH CDR3 having an amino acid sequence of a VH CDR1, a VH CDR2, and a VH CDR3, respectively, of a VH having an amino acid sequence of SEQ ID NO:1391; and (ii) a VL comprising a VL CDR1, a VL CDR2, and a VL CDR3 having an amino acid sequence of a VL CDR1, a VL CDR2, and a VL CDR3, respectively, of a VL having an amino acid sequence of SEQ ID NO:1392. In some embodiments, the first antigen binding domain that specifically binds CD8 comprises: (i) a VH comprising a VH CDR1, a VH CDR2, and a VH CDR3 having an amino acid sequence of a VH CDR1, a VH CDR2, and a VH CDR3, respectively, of a VH having an amino acid sequence of SEQ ID NO:1425; and (ii) a VL comprising a VL CDR1, a VL CDR2, and a VL CDR3 having an amino acid sequence of a VL CDR1, a VL CDR2, and a VL CDR3, respectively, of a VL having an amino acid sequence of SEQ ID NO:1426. In some embodiments, the first antigen binding domain that specifically binds CD8 comprises: (i) a VH comprising a VH CDR1, a VH CDR2, and a VH CDR3 having an amino acid sequence of a VH CDR1, a VH CDR2, and a VH CDR3, respectively, of a VH having an amino acid sequence of SEQ ID NO:1459; and (ii) a VL comprising a VL CDR1, a VL CDR2, and a VL CDR3 having an amino acid sequence of a VL CDR1, a VL CDR2, and a VL CDR3, respectively, of a VL having an amino acid sequence of SEQ ID NO:1460. In some embodiments, the first antigen binding domain that specifically binds CD8 comprises: (i) a VH comprising a VH CDR1, a VH CDR2, and a VH CDR3 having an amino acid sequence of a VH CDR1, a VH CDR2, and a VH CDR3, respectively, of a VH having an amino acid sequence of SEQ ID NO:1493; and (ii) a VL comprising a VL CDR1, a VL CDR2, and a VL CDR3 having an amino acid sequence of a VL CDR1, a VL CDR2, and a VL CDR3, respectively, of a VL having an amino acid sequence of SEQ ID NO:1494. In some embodiments, the first antigen binding domain that specifically binds CD8 comprises: (i) a VH comprising a VH CDR1, a VH CDR2, and a VH CDR3 having an amino acid sequence of a VH CDR1, a VH CDR2, and a VH CDR3, respectively, of a VH having an amino acid sequence of SEQ ID NO:1527; and (ii) a VL comprising a VL CDR1, a VL CDR2, and a VL CDR3 having an amino acid sequence of a VL CDR1, a VL CDR2, and a VL CDR3, respectively, of a VL having an amino acid sequence of SEQ ID NO:1528. In some embodiments, the first antigen binding domain that specifically binds CD8 comprises: (i) a VH comprising a VH CDR1, a VH CDR2, and a VH CDR3 having an amino acid sequence of a VH CDR1, a VH CDR2, and a VH CDR3, respectively, of a VH having an amino acid sequence of SEQ ID NO:1561; and (ii) a VL comprising a VL CDR1, a VL CDR2, and a VL CDR3 having an amino acid sequence of a VL CDR1, a VL CDR2, and a VL CDR3, respectively, of a VL having an amino acid sequence of SEQ ID NO:1562. In some embodiments, the first antigen binding domain that specifically binds CD8 comprises: (i) a VH comprising a VH CDR1, a VH CDR2, and a VH CDR3 having an amino acid sequence of a VH CDR1, a VH CDR2, and a VH CDR3, respectively, of a VH having an amino acid sequence of SEQ ID NO:1595; and (ii) a VL comprising a VL CDR1, a VL CDR2, and a VL CDR3 having an amino acid sequence of a VL CDR1, a VL CDR2, and a VL CDR3, respectively, of a VL having an amino acid sequence of SEQ ID NO:1596. In some embodiments, the first antigen binding domain that specifically binds CD8 comprises: (i) a VH comprising a VH CDR1, a VH CDR2, and a VH CDR3 having an amino acid sequence of a VH CDR1, a VH CDR2, and a VH CDR3, respectively, of a VH having an amino acid sequence of SEQ ID NO:1629; and (ii) a VL comprising a VL CDR1, a VL CDR2, and a VL CDR3 having an amino acid sequence of a VL CDR1, a VL CDR2, and a VL CDR3, respectively, of a VL having an amino acid sequence of SEQ ID NO:1630. In some embodiments, the first antigen binding domain that specifically binds CD8 comprises: (i) a VH comprising a VH CDR1, a VH CDR2, and a VH CDR3 having an amino acid sequence of a VH CDR1, a VH CDR2, and a VH CDR3, respectively, of a VH having an amino acid sequence of SEQ ID NO:1663; and (ii) a VL comprising a VL CDR1, a VL CDR2, and a VL CDR3 having an amino acid sequence of a VL CDR1, a VL CDR2, and a VL CDR3, respectively, of a VL having an amino acid sequence of SEQ ID NO:1664. In some embodiments, the first antigen binding domain that specifically binds CD8 comprises: (i) a VH comprising a VH CDR1, a VH CDR2, and a VH CDR3 having an amino acid sequence of a VH CDR1, a VH CDR2, and a VH CDR3, respectively, of a VH having an amino acid sequence of SEQ ID NO:1697; and (ii) a VL comprising a VL CDR1, a VL CDR2, and a VL CDR3 having an amino acid sequence of a VL CDR1, a VL CDR2, and a VL CDR3, respectively, of a VL having an amino acid sequence of SEQ ID NO:1698. In some embodiments, the first antigen binding domain that specifically binds CD8 comprises: (i) a VH comprising a VH CDR1, a VH CDR2, and a VH CDR3 having an amino acid sequence of a VH CDR1, a VH CDR2, and a VH CDR3, respectively, of a VH having an amino acid sequence of SEQ ID NO:1731; and (ii) a VL comprising a VL CDR1, a VL CDR2, and a VL CDR3 having an amino acid sequence of a VL CDR1, a VL CDR2, and a VL CDR3, respectively, of a VL having an amino acid sequence of SEQ ID NO:1732. In some embodiments, the first antigen binding domain that specifically binds CD8 comprises: (i) a VH comprising a VH CDR1, a VH CDR2, and a VH CDR3 having an amino acid sequence of a VH CDR1, a VH CDR2, and a VH CDR3, respectively, of a VH having an amino acid sequence of SEQ ID NO:1765; and (ii) a VL comprising a VL CDR1, a VL CDR2, and a VL CDR3 having an amino acid sequence of a VL CDR1, a VL CDR2, and a VL CDR3, respectively, of a VL having an amino acid sequence of SEQ ID NO:1766. In some embodiments, the first antigen binding domain that specifically binds CD8 comprises: (i) a VH comprising a VH CDR1, a VH CDR2, and a VH CDR3 having an amino acid sequence of a VH CDR1, a VH CDR2, and a VH CDR3, respectively, of a VH having an amino acid sequence of SEQ ID NO:1799; and (ii) a VL comprising a VL CDR1, a VL CDR2, and a VL CDR3 having an amino acid sequence of a VL CDR1, a VL CDR2, and a VL CDR3, respectively, of a VL having an amino acid sequence of SEQ ID NO:1800. In some embodiments, the first antigen binding domain that specifically binds CD8 comprises: (i) a VH comprising a VH CDR1, a VH CDR2, and a VH CDR3 having an amino acid sequence of a VH CDR1, a VH CDR2, and a VH CDR3, respectively, of a VH having an amino acid sequence of SEQ ID NO:1833; and (ii) a VL comprising a VL CDR1, a VL CDR2, and a VL CDR3 having an amino acid sequence of a VL CDR1, a VL CDR2, and a VL CDR3, respectively, of a VL having an amino acid sequence of SEQ ID NO:1834. In some embodiments, the first antigen binding domain that specifically binds CD8 comprises: (i) a VH comprising a VH CDR1, a VH CDR2, and a VH CDR3 having an amino acid sequence of a VH CDR1, a VH CDR2, and a VH CDR3, respectively, of a VH having an amino acid sequence of SEQ ID NO:1867; and (ii) a VL comprising a VL CDR1, a VL CDR2, and a VL CDR3 having an amino acid sequence of a VL CDR1, a VL CDR2, and a VL CDR3, respectively, of a VL having an amino acid sequence of SEQ ID NO:1868. In some embodiments, the first antigen binding domain that specifically binds CD8 comprises: (i) a VH comprising a VH CDR1, a VH CDR2, and a VH CDR3 having an amino acid sequence of a VH CDR1, a VH CDR2, and a VH CDR3, respectively, of a VH having an amino acid sequence of SEQ ID NO:1901; and (ii) a VL comprising a VL CDR1, a VL CDR2, and a VL CDR3 having an amino acid sequence of a VL CDR1, a VL CDR2, and a VL CDR3, respectively, of a VL having an amino acid sequence of SEQ ID NO:1902. In some embodiments, the first antigen binding domain that specifically binds CD8 comprises: (i) a VH comprising a VH CDR1, a VH CDR2, and a VH CDR3 having an amino acid sequence of a VH CDR1, a VH CDR2, and a VH CDR3, respectively, of a VH having an amino acid sequence of SEQ ID NO:1935; and (ii) a VL comprising a VL CDR1, a VL CDR2, and a VL CDR3 having an amino acid sequence of a VL CDR1, a VL CDR2, and a VL CDR3, respectively, of a VL having an amino acid sequence of SEQ ID NO:1936. In some embodiments, the first antigen binding domain that specifically binds CD8 comprises: (i) a VH comprising a VH CDR1, a VH CDR2, and a VH CDR3 having an amino acid sequence of a VH CDR1, a VH CDR2, and a VH CDR3, respectively, of a VH having an amino acid sequence of SEQ ID NO:1969; and (ii) a VL comprising a VL CDR1, a VL CDR2, and a VL CDR3 having an amino acid sequence of a VL CDR1, a VL CDR2, and a VL CDR3, respectively, of a VL having an amino acid sequence of SEQ ID NO:1970. In some embodiments, the first antigen binding domain that specifically binds CD8 comprises: (i) a VH comprising a VH CDR1, a VH CDR2, and a VH CDR3 having an amino acid sequence of a VH CDR1, a VH CDR2, and a VH CDR3, respectively, of a VH having an amino acid sequence of SEQ ID NO:2003; and (ii) a VL comprising a VL CDR1, a VL CDR2, and a VL CDR3 having an amino acid sequence of a VL CDR1, a VL CDR2, and a VL CDR3, respectively, of a VL having an amino acid sequence of SEQ ID NO:2004. In another aspect, provided herein is an antibody that binds CD8. In some embodiments, the first antigen binding domain that specifically binds CD8 comprises: (i) a VH comprising a VH CDR1, a VH CDR2, and a VH CDR3 having an amino acid sequence of a VH CDR1, a VH CDR2, and a VH CDR3, respectively, of a VH having an amino acid sequence of SEQ ID NO:2037; and (ii) a VL comprising a VL CDR1, a VL CDR2, and a VL CDR3 having an amino acid sequence of a VL CDR1, a VL CDR2, and a VL CDR3, respectively, of a VL having an amino acid sequence of SEQ ID NO:2038. In some embodiments, the first antigen binding domain that specifically binds CD8 comprises: (i) a VH comprising a VH CDR1, a VH CDR2, and a VH CDR3 having an amino acid sequence of a VH CDR1, a VH CDR2, and a VH CDR3, respectively, of a VH having an amino acid sequence of SEQ ID NO:2071; and (ii) a VL comprising a VL CDR1, a VL CDR2, and a VL CDR3 having an amino acid sequence of a VL CDR1, a VL CDR2, and a VL CDR3, respectively, of a VL having an amino acid sequence of SEQ ID NO:2072. In some embodiments, the first antigen binding domain that specifically binds CD8 comprises: (i) a VH comprising a VH CDR1, a VH CDR2, and a VH CDR3 having an amino acid sequence of a VH CDR1, a VH CDR2, and a VH CDR3, respectively, of a VH having an amino acid sequence of SEQ ID NO:2105; and (ii) a VL comprising a VL CDR1, a VL CDR2, and a VL CDR3 having an amino acid sequence of a VL CDR1, a VL CDR2, and a VL CDR3, respectively, of a VL having an amino acid sequence of SEQ ID NO:2106. In some embodiments, the first antigen binding domain that specifically binds CD8 comprises: (i) a VH comprising a VH CDR1, a VH CDR2, and a VH CDR3 having an amino acid sequence of a VH CDR1, a VH CDR2, and a VH CDR3, respectively, of a VH having an amino acid sequence of SEQ ID NO:2139; and (ii) a VL comprising a VL CDR1, a VL CDR2, and a VL CDR3 having an amino acid sequence of a VL CDR1, a VL CDR2, and a VL CDR3, respectively, of a VL having an amino acid sequence of SEQ ID NO:2140. In some embodiments, the first antigen binding domain that specifically binds CD8 comprises: (i) a VH comprising a VH CDR1, a VH CDR2, and a VH CDR3 having an amino acid sequence of a VH CDR1, a VH CDR2, and a VH CDR3, respectively, of a VH having an amino acid sequence of SEQ ID NO:2173; and (ii) a VL comprising a VL CDR1, a VL CDR2, and a VL CDR3 having an amino acid sequence of a VL CDR1, a VL CDR2, and a VL CDR3, respectively, of a VL having an amino acid sequence of SEQ ID NO:2174. In some embodiments, the VH CDR1, VH CDR2, VH CDR3, VL CDR1, VL CDR2, and VL CDR3 amino acid sequences of the first antigen binding domain that specifically binds CD8 are according to the Kabat numbering system. In some embodiments, the VH CDR1, VH CDR2, VH CDR3, VL CDR1, VL CDR2, and VL CDR3 amino acid sequences of the first antigen binding domain that specifically binds CD8 are according to the Chothia numbering system. In some embodiments, the VH CDR1, VH CDR2, VH CDR3, VL CDR1, VL CDR2, and VL CDR3 amino acid sequences of the first antigen binding domain that specifically binds CD8 are according to the AbM numbering system. In some embodiments, the VH CDR1, VH CDR2, VH CDR3, VL CDR1, VL CDR2, and VL CDR3 amino acid sequences of the first antigen binding domain that specifically binds CD8 are according to the Contact numbering system. In some embodiments, the VH CDR1, VH CDR2, VH CDR3, VL CDR1, VL CDR2, and VL CDR3 amino acid sequences of the first antigen binding domain that specifically binds CD8 are according to the IMGT numbering system.

[0184] In some embodiments, the first antigen binding domain that specifically binds CD8 binds a CD8 antigen. In some embodiments, the first antigen binding domain that specifically binds CD8 binds a CD8 epitope. In some embodiments, the VH CDR1, VH CDR2, VH CDR3, VL CDR1, VL CDR2 and VL CDR3 form a binding site for an antigen of the CD8. In some embodiments, the VH CDR1, VH CDR2, VH CDR3, VL CDR1, VL CDR2 and VL CDR3 form a binding site for an epitope of the CD8. In some embodiments, the CD8 is present on the surface of a T cell.

[0185] In some embodiments, the first antigen binding domain that specifically binds CD8 binds to CD8α. In some embodiments, the first antigen binding domain that specifically binds CD8 binds a CD8α antigen. In some embodiments, the first antigen binding domain that specifically binds CD8 binds a CD8α epitope. In some embodiments, the VH CDR1, VH CDR2, VH CDR3, VL CDR1, VL CDR2 and VL CDR3 form a binding site for an antigen of the CD8α. In some embodiments, the VH CDR1, VH CDR2, VH CDR3, VL CDR1, VL CDR2 and VL CDR3 form a binding site for an epitope of the CD8α. In some embodiments, the CD8α is present on the surface of a T cell.

[0186] In some embodiments, the first antigen binding domain that specifically binds CD8 binds to CD8β. In some embodiments, the first antigen binding domain that specifically binds CD8 binds a CD8β antigen. In some embodiments, the first antigen binding domain that specifically binds CD8 binds a CD8β epitope. In some embodiments, the VH CDR1, VH CDR2, VH CDR3, VL CDR1, VL CDR2 and VL CDR3 form a binding site for an antigen of the CD8β. In some embodiments, the VH CDR1, VH CDR2, VH CDR3, VL CDR1, VL CDR2 and VL CDR3 form a binding site for an epitope of the CD8β. In some embodiments, the CD8β is present on the surface of a T cell.

[0187] In some embodiments, the first antigen binding domain that specifically binds CD8 binds at the interface of CD8α and CD8β. In some embodiments, the first antigen binding domain that specifically binds CD8 binds an antigen at the interface of CD8α and CD8β. In some embodiments, the first antigen binding domain that specifically binds CD8 binds an epitope at the interface of CD8α and CD8β. In some embodiments, the VH CDR1, VH CDR2, VH CDR3, VL CDR1, VL CDR2 and VL CDR3 form a binding site for an antigen at the interface of CD8α and CD8β. In some embodiments, the VH CDR1, VH CDR2, VH CDR3, VL CDR1, VL CDR2 and VL CDR3 form a binding site for an epitope at the interface of CD8α and CD8β. In some embodiments, the interface of CD8α and CD8β is present on the surface of a T cell.

[0188] In some embodiments, the VH CDR1, VH CDR2, VH CDR3, VL CDR1, VL CDR2, and VL CDR3 sequences are according to the Kabat numbering system. In some embodiments, the VH CDR1, VH CDR2, VH CDR3, VL CDR1, VL CDR2, and VL CDR3 sequences are according to the Chothia numbering system. In some embodiments, the VH CDR1, VH CDR2, VH CDR3, VL CDR1, VL CDR2, and VL CDR3 sequences are according to the Exemplary numbering system. In some embodiments, the VH CDR1, VH CDR2, VH CDR3, VL CDR1, VL CDR2, and VL CDR3 sequences are according to the Contact numbering system. In some embodiments, the VH CDR1, VH CDR2, VH CDR3, VL CDR1, VL CDR2, and VL CDR3 sequences are according to the IMGT numbering system. In some embodiments, the VH CDR1, VH CDR2, VH CDR3, VL CDR1, VL CDR2, and VL CDR3 sequences are according to the AbM numbering system. Exemplary sets of 6 CDRs (VH CDR1-3 and VL CDR1-3) of certain antibody embodiments are provided herein. Other sets of CDRs are contemplated and within the scope of the antibody embodiments provided herein.

[0189] In one embodiment, the first antigen binding domain that specifically binds CD8, comprises: (i) a VH comprising a VH CDR1, a VH CDR2, and a VH CDR3 having an amino acid sequence of SEQ ID NOs:1, 2, and 3, respectively, and (ii) a VL comprising a VL CDR1, VL CDR2, and VL CDR3 having an amino acid sequence of SEQ ID NOs:4, 5, and 6, respectively. In one embodiment, the first antigen binding domain that specifically binds CD8, comprises: (i) a VH comprising a VH CDR1, a VH CDR2, and a VH CDR3 having an amino acid sequence of SEQ ID NOs:7, 8, and 9, respectively, and (ii) a VL comprising a VL CDR1, VL CDR2, and VL CDR3 having an amino acid sequence of SEQ ID NOs:10, 11, and 12, respectively. In one embodiment, the first antigen binding domain that specifically binds CD8, comprises: (i) a VH comprising a VH CDR1, a VH CDR2, and a VH CDR3 having an amino acid sequence of SEQ ID NOs:13, 14, and 15, respectively, and (ii) a VL comprising a VL CDR1, VL CDR2, and VL CDR3 having an amino acid sequence of SEQ ID NOs:16, 17, and 18, respectively. In one embodiment, the first antigen binding domain that specifically binds CD8, comprises: (i) a VH comprising a VH CDR1, a VH CDR2, and a VH CDR3 having an amino acid sequence of SEQ ID NOs:19, 20, and 21, respectively, and (ii) a VL comprising a VL CDR1, VL CDR2, and VL CDR3 having an amino acid sequence of SEQ ID NOs:22, 23, and 24, respectively. In one embodiment, the first antigen binding domain that specifically binds CD8, comprises: (i) a VH comprising a VH CDR1, a VH CDR2, and a VH CDR3 having an amino acid sequence of SEQ ID NOs:25, 26, and 27, respectively, and (ii) a VL comprising a VL CDR1, VL CDR2, and VL CDR3 having an amino acid sequence of SEQ ID NOs:28, 29, and 30, respectively. In one embodiment, the first antigen binding domain that specifically binds CD8, comprises: (i) a VH comprising a VH CDR1, a VH CDR2, and a VH CDR3 having an amino acid sequence of a VH CDR1, a VH CDR2, and a VH CDR3, respectively, of a VH having an amino acid sequence of SEQ ID NO:31; and (ii) a VL comprising a VL CDR1, a VL CDR2, and a VL CDR3 having an amino acid sequence of a VL CDR1, a VL CDR2, and a VL CDR3, respectively, of a VL having an amino acid sequence of SEQ ID NO:32. In one aspect, provided herein is an antibody that binds CD8, comprising a VH having an amino acid sequence of SEQ ID NO:31. In one aspect, provided herein is an antibody that binds CD8, comprising a VL having an amino acid sequence of SEQ ID NO:32. In one aspect, provided herein is an antibody that binds CD8, comprising a VH having an amino acid sequence of SEQ ID NO:31, and a VL having an amino acid sequence of SEQ ID NO:32. In one aspect, provided herein is an antibody that binds CD8, comprising a heavy chain having an amino acid sequence of SEQ ID NO:33. In one aspect, provided herein is an antibody that binds CD8, comprising a light chain having an amino acid sequence of SEQ ID NO:34. In one aspect, provided herein is an antibody that binds CD8, comprising a heavy chain having an amino acid sequence of SEQ ID NO:33, and a light chain having an amino acid sequence of SEQ ID NO:34. In one aspect, provided herein is an antibody that binds CD8, comprising a VH having an amino acid sequence having at least 95% identity to an amino acid sequence of SEQ ID NO:31. In one aspect, provided herein is an antibody that binds CD8, comprising a VL having an amino acid sequence having at least 95% identity to an amino acid sequence of SEQ ID NO:32. In one aspect, provided herein is an antibody that binds CD8, comprising a VH having an amino acid sequence having at least 95% identity to an amino acid sequence of SEQ ID NO:31, and a VL having an amino acid sequence having at least 95% identity to an amino acid sequence of SEQ ID NO:32. In one aspect, provided herein is an antibody that binds CD8, comprising a heavy chain having an amino acid sequence having at least 95% identity to an amino acid sequence of SEQ ID NO:33. In one aspect, provided herein is an antibody that binds CD8, comprising a light chain having an amino acid sequence having at least 95% identity to an amino acid sequence of SEQ ID NO:34. In one aspect, provided herein is an antibody that binds CD8, comprising a heavy chain having an amino acid sequence having at least 95% identity to an amino acid sequence of SEQ ID NO:33, and a light chain having an amino acid sequence having at least 95% identity to an amino acid sequence of SEQ ID NO:34.

[0190] In one embodiment, the first antigen binding domain that specifically binds CD8, comprises: (i) a VH comprising a VH CDR1, a VH CDR2, and a VH CDR3 having an amino acid sequence of SEQ ID NOs:35, 36, and 37, respectively, and (ii) a VL comprising a VL CDR1, VL CDR2, and VL CDR3 having an amino acid sequence of SEQ ID NOs:38, 39, and 40, respectively. In one embodiment, the first antigen binding domain that specifically binds CD8, comprises: (i) a VH comprising a VH CDR1, a VH CDR2, and a VH CDR3 having an amino acid sequence of SEQ ID NOs:41, 42, and 43, respectively, and (ii) a VL comprising a VL CDR1, VL CDR2, and VL CDR3 having an amino acid sequence of SEQ ID NOs:44, 45, and 46, respectively. In one embodiment, the first antigen binding domain that specifically binds CD8, comprises: (i) a VH comprising a VH CDR1, a VH CDR2, and a VH CDR3 having an amino acid sequence of SEQ ID NOs:47, 48, and 49, respectively, and (ii) a VL comprising a VL CDR1, VL CDR2, and VL CDR3 having an amino acid sequence of SEQ ID NOs:50, 51, and 52, respectively. In one embodiment, the first antigen binding domain that specifically binds CD8, comprises: (i) a VH comprising a VH CDR1, a VH CDR2, and a VH CDR3 having an amino acid sequence of SEQ ID NOs:53, 54, and 55, respectively, and (ii) a VL comprising a VL CDR1, VL CDR2, and VL CDR3 having an amino acid sequence of SEQ ID NOs:56, 57, and 58, respectively. In one embodiment, the first antigen binding domain that specifically binds CD8, comprises: (i) a VH comprising a VH CDR1, a VH CDR2, and a VH CDR3 having an amino acid sequence of SEQ ID NOs:59, 60, and 61, respectively, and (ii) a VL comprising a VL CDR1, VL CDR2, and VL CDR3 having an amino acid sequence of SEQ ID NOs:62, 63, and 64, respectively. In one embodiment, the first antigen binding domain that specifically binds CD8, comprises: (i) a VH comprising a VH CDR1, a VH CDR2, and a VH CDR3 having an amino acid sequence of a VH CDR1, a VH CDR2, and a VH CDR3, respectively, of a VH having an amino acid sequence of SEQ ID NO:65; and (ii) a VL comprising a VL CDR1, a VL CDR2, and a VL CDR3 having an amino acid sequence of a VL CDR1, a VL CDR2, and a VL CDR3, respectively, of a VL having an amino acid sequence of SEQ ID NO:66. In one aspect, provided herein is an antibody that binds CD8, comprising a VH having an amino acid sequence of SEQ ID NO:65. In one aspect, provided herein is an antibody that binds CD8, comprising a VL having an amino acid sequence of SEQ ID NO:66. In one aspect, provided herein is an antibody that binds CD8, comprising a VH having an amino acid sequence of SEQ ID NO:65, and a VL having an amino acid sequence of SEQ ID NO:66. In one aspect, provided herein is an antibody that binds CD8, comprising a heavy chain having an amino acid sequence of SEQ ID NO:67. In one aspect, provided herein is an antibody that binds CD8, comprising a light chain having an amino acid sequence of SEQ ID NO:68. In one aspect, provided herein is an antibody that binds CD8, comprising a heavy chain having an amino acid sequence of SEQ ID NO:67, and a light chain having an amino acid sequence of SEQ ID NO:68. In one aspect, provided herein is an antibody that binds CD8, comprising a VH having an amino acid sequence having at least 95% identity to an amino acid sequence of SEQ ID NO:65. In one aspect, provided herein is an antibody that binds CD8, comprising a VL having an amino acid sequence having at least 95% identity to an amino acid sequence of SEQ ID NO:66. In one aspect, provided herein is an antibody that binds CD8, comprising a VH having an amino acid sequence having at least 95% identity to an amino acid sequence of SEQ ID NO:65, and a VL having an amino acid sequence having at least 95% identity to an amino acid sequence of SEQ ID NO:66. In one aspect, provided herein is an antibody that binds CD8, comprising a heavy chain having an amino acid sequence having at least 95% identity to an amino acid sequence of SEQ ID NO:67. In one aspect, provided herein is an antibody that binds CD8, comprising a light chain having an amino acid sequence having at least 95% identity to an amino acid sequence of SEQ ID NO:68. In one aspect, provided herein is an antibody that binds CD8, comprising a heavy chain having an amino acid sequence having at least 95% identity to an amino acid sequence of SEQ ID NO:67, and a light chain having an amino acid sequence having at least 95% identity to an amino acid sequence of SEQ ID NO:68.

[0191] In one embodiment, the first antigen binding domain that specifically binds CD8, comprises: (i) a VH comprising a VH CDR1, a VH CDR2, and a VH CDR3 having an amino acid sequence of SEQ ID NOs:69, 70, and 71, respectively, and (ii) a VL comprising a VL CDR1, VL CDR2, and VL CDR3 having an amino acid sequence of SEQ ID NOs:72, 73, and 74, respectively. In one embodiment, the first antigen binding domain that specifically binds CD8, comprises: (i) a VH comprising a VH CDR1, a VH CDR2, and a VH CDR3 having an amino acid sequence of SEQ ID NOs:75, 76, and 77, respectively, and (ii) a VL comprising a VL CDR1, VL CDR2, and VL CDR3 having an amino acid sequence of SEQ ID NOs:78, 79, and 80, respectively. In one embodiment, the first antigen binding domain that specifically binds CD8, comprises: (i) a VH comprising a VH CDR1, a VH CDR2, and a VH CDR3 having an amino acid sequence of SEQ ID NOs:81, 82, and 83, respectively, and (ii) a VL comprising a VL CDR1, VL CDR2, and VL CDR3 having an amino acid sequence of SEQ ID NOs:84, 85, and 86, respectively. In one embodiment, the first antigen binding domain that specifically binds CD8, comprises: (i) a VH comprising a VH CDR1, a VH CDR2, and a VH CDR3 having an amino acid sequence of SEQ ID NOs:87, 88, and 89, respectively, and (ii) a VL comprising a VL CDR1, VL CDR2, and VL CDR3 having an amino acid sequence of SEQ ID NOs:90, 91, and 92, respectively. In one embodiment, the first antigen binding domain that specifically binds CD8, comprises: (i) a VH comprising a VH CDR1, a VH CDR2, and a VH CDR3 having an amino acid sequence of SEQ ID NOs:93, 94, and 95, respectively, and (ii) a VL comprising a VL CDR1, VL CDR2, and VL CDR3 having an amino acid sequence of SEQ ID NOs:96, 97, and 98, respectively. In one embodiment, the first antigen binding domain that specifically binds CD8, comprises: (i) a VH comprising a VH CDR1, a VH CDR2, and a VH CDR3 having an amino acid sequence of a VH CDR1, a VH CDR2, and a VH CDR3, respectively, of a VH having an amino acid sequence of SEQ ID NO:99; and (ii) a VL comprising a VL CDR1, a VL CDR2, and a VL CDR3 having an amino acid sequence of a VL CDR1, a VL CDR2, and a VL CDR3, respectively, of a VL having an amino acid sequence of SEQ ID NO:100. In one aspect, provided herein is an antibody that binds CD8, comprising a VH having an amino acid sequence of SEQ ID NO:99. In one aspect, provided herein is an antibody that binds CD8, comprising a VL having an amino acid sequence of SEQ ID NO:100. In one aspect, provided herein is an antibody that binds CD8, comprising a VH having an amino acid sequence of SEQ ID NO:99, and a VL having an amino acid sequence of SEQ ID NO:100. In one aspect, provided herein is an antibody that binds CD8, comprising a heavy chain having an amino acid sequence of SEQ ID NO:101. In one aspect, provided herein is an antibody that binds CD8, comprising a light chain having an amino acid sequence of SEQ ID NO:102. In one aspect, provided herein is an antibody that binds CD8, comprising a heavy chain having an amino acid sequence of SEQ ID NO:101, and a light chain having an amino acid sequence of SEQ ID NO:102. In one aspect, provided herein is an antibody that binds CD8, comprising a VH having an amino acid sequence having at least 95% identity to an amino acid sequence of SEQ ID NO:99. In one aspect, provided herein is an antibody that binds CD8, comprising a VL having an amino acid sequence having at least 95% identity to an amino acid sequence of SEQ ID NO:100. In one aspect, provided herein is an antibody that binds CD8, comprising a VH having an amino acid sequence having at least 95% identity to an amino acid sequence of SEQ ID NO:99, and a VL having an amino acid sequence having at least 95% identity to an amino acid sequence of SEQ ID NO:100. In one aspect, provided herein is an antibody that binds CD8, comprising a heavy chain having an amino acid sequence having at least 95% identity to an amino acid sequence of SEQ ID NO:101. In one aspect, provided herein is an antibody that binds CD8, comprising a light chain having an amino acid sequence having at least 95% identity to an amino acid sequence of SEQ ID NO:102. In one aspect, provided herein is an antibody that binds CD8, comprising a heavy chain having an amino acid sequence having at least 95% identity to an amino acid sequence of SEQ ID NO:101, and a light chain having an amino acid sequence having at least 95% identity to an amino acid sequence of SEQ ID NO:102.

[0192] In one embodiment, the first antigen binding domain that specifically binds CD8, comprises: (i) a VH comprising a VH CDR1, a VH CDR2, and a VH CDR3 having an amino acid sequence of SEQ ID NOs:103, 104, and 105, respectively, and (ii) a VL comprising a VL CDR1, VL CDR2, and VL CDR3 having an amino acid sequence of SEQ ID NOs:106, 107, and 108, respectively. In one embodiment, the first antigen binding domain that specifically binds CD8, comprises: (i) a VH comprising a VH CDR1, a VH CDR2, and a VH CDR3 having an amino acid sequence of SEQ ID NOs:109, 110, and 111, respectively, and (ii) a VL comprising a VL CDR1, VL CDR2, and VL CDR3 having an amino acid sequence of SEQ ID NOs:112, 113, and 114, respectively. In one embodiment, the first antigen binding domain that specifically binds CD8, comprises: (i) a VH comprising a VH CDR1, a VH CDR2, and a VH CDR3 having an amino acid sequence of SEQ ID NOs:115, 116, and 117, respectively, and (ii) a VL comprising a VL CDR1, VL CDR2, and VL CDR3 having an amino acid sequence of SEQ ID NOs:118, 119, and 120, respectively. In one embodiment, the first antigen binding domain that specifically binds CD8, comprises: (i) a VH comprising a VH CDR1, a VH CDR2, and a VH CDR3 having an amino acid sequence of SEQ ID NOs:121, 122, and 123, respectively, and (ii) a VL comprising a VL CDR1, VL CDR2, and VL CDR3 having an amino acid sequence of SEQ ID NOs:124, 125, and 126, respectively. In one embodiment, the first antigen binding domain that specifically binds CD8, comprises: (i) a VH comprising a VH CDR1, a VH CDR2, and a VH CDR3 having an amino acid sequence of SEQ ID NOs:127, 128, and 129, respectively, and (ii) a VL comprising a VL CDR1, VL CDR2, and VL CDR3 having an amino acid sequence of SEQ ID NOs:130, 131, and 132, respectively. In one embodiment, the first antigen binding domain that specifically binds CD8, comprises: (i) a VH comprising a VH CDR1, a VH CDR2, and a VH CDR3 having an amino acid sequence of a VH CDR1, a VH CDR2, and a VH CDR3, respectively, of a VH having an amino acid sequence of SEQ ID NO:133; and (ii) a VL comprising a VL CDR1, a VL CDR2, and a VL CDR3 having an amino acid sequence of a VL CDR1, a VL CDR2, and a VL CDR3, respectively, of a VL having an amino acid sequence of SEQ ID NO:134. In one aspect, provided herein is an antibody that binds CD8, comprising a VH having an amino acid sequence of SEQ ID NO:133. In one aspect, provided herein is an antibody that binds CD8, comprising a VL having an amino acid sequence of SEQ ID NO:134. In one aspect, provided herein is an antibody that binds CD8, comprising a VH having an amino acid sequence of SEQ ID NO:133, and a VL having an amino acid sequence of SEQ ID NO:134. In one aspect, provided herein is an antibody that binds CD8, comprising a heavy chain having an amino acid sequence of SEQ ID NO:135. In one aspect, provided herein is an antibody that binds CD8, comprising a light chain having an amino acid sequence of SEQ ID NO:136. In one aspect, provided herein is an antibody that binds CD8, comprising a heavy chain having an amino acid sequence of SEQ ID NO:135, and a light chain having an amino acid sequence of SEQ ID NO:136. In one aspect, provided herein is an antibody that binds CD8, comprising a VH having an amino acid sequence having at least 95% identity to an amino acid sequence of SEQ ID NO:133. In one aspect, provided herein is an antibody that binds CD8, comprising a VL having an amino acid sequence having at least 95% identity to an amino acid sequence of SEQ ID NO:134. In one aspect, provided herein is an antibody that binds CD8, comprising a VH having an amino acid sequence having at least 95% identity to an amino acid sequence of SEQ ID NO:133, and a VL having an amino acid sequence having at least 95% identity to an amino acid sequence of SEQ ID NO:134. In one aspect, provided herein is an antibody that binds CD8, comprising a heavy chain having an amino acid sequence having at least 95% identity to an amino acid sequence of SEQ ID NO:135. In one aspect, provided herein is an antibody that binds CD8, comprising a light chain having an amino acid sequence having at least 95% identity to an amino acid sequence of SEQ ID NO:136. In one aspect, provided herein is an antibody that binds CD8, comprising a heavy chain having an amino acid sequence having at least 95% identity to an amino acid sequence of SEQ ID NO:135, and a light chain having an amino acid sequence having at least 95% identity to an amino acid sequence of SEQ ID NO:136.

[0193] In one embodiment, the first antigen binding domain that specifically binds CD8, comprises: (i) a VH comprising a VH CDR1, a VH CDR2, and a VH CDR3 having an amino acid sequence of SEQ ID NOs:137, 138, and 139, respectively, and (ii) a VL comprising a VL CDR1, VL CDR2, and VL CDR3 having an amino acid sequence of SEQ ID NOs:140, 141, and 142, respectively. In one embodiment, the first antigen binding domain that specifically binds CD8, comprises: (i) a VH comprising a VH CDR1, a VH CDR2, and a VH CDR3 having an amino acid sequence of SEQ ID NOs:143, 144, and 145, respectively, and (ii) a VL comprising a VL CDR1, VL CDR2, and VL CDR3 having an amino acid sequence of SEQ ID NOs:146, 147, and 148, respectively. In one embodiment, the first antigen binding domain that specifically binds CD8, comprises: (i) a VH comprising a VH CDR1, a VH CDR2, and a VH CDR3 having an amino acid sequence of SEQ ID NOs:149, 150, and 151, respectively, and (ii) a VL comprising a VL CDR1, VL CDR2, and VL CDR3 having an amino acid sequence of SEQ ID NOs:152, 153, and 154, respectively. In one embodiment, the first antigen binding domain that specifically binds CD8, comprises: (i) a VH comprising a VH CDR1, a VH CDR2, and a VH CDR3 having an amino acid sequence of SEQ ID NOs:155, 156, and 157, respectively, and (ii) a VL comprising a VL CDR1, VL CDR2, and VL CDR3 having an amino acid sequence of SEQ ID NOs:158, 159, and 160, respectively. In one embodiment, the first antigen binding domain that specifically binds CD8, comprises: (i) a VH comprising a VH CDR1, a VH CDR2, and a VH CDR3 having an amino acid sequence of SEQ ID NOs:161, 162, and 163, respectively, and (ii) a VL comprising a VL CDR1, VL CDR2, and VL CDR3 having an amino acid sequence of SEQ ID NOs:164, 165, and 166, respectively. In one embodiment, the first antigen binding domain that specifically binds CD8, comprises: (i) a VH comprising a VH CDR1, a VH CDR2, and a VH CDR3 having an amino acid sequence of a VH CDR1, a VH CDR2, and a VH CDR3, respectively, of a VH having an amino acid sequence of SEQ ID NO:167; and (ii) a VL comprising a VL CDR1, a VL CDR2, and a VL CDR3 having an amino acid sequence of a VL CDR1, a VL CDR2, and a VL CDR3, respectively, of a VL having an amino acid sequence of SEQ ID NO:168. In one aspect, provided herein is an antibody that binds CD8, comprising a VH having an amino acid sequence of SEQ ID NO:167. In one aspect, provided herein is an antibody that binds CD8, comprising a VL having an amino acid sequence of SEQ ID NO:168. In one aspect, provided herein is an antibody that binds CD8, comprising a VH having an amino acid sequence of SEQ ID NO:167, and a VL having an amino acid sequence of SEQ ID NO:168. In one aspect, provided herein is an antibody that binds CD8, comprising a heavy chain having an amino acid sequence of SEQ ID NO:169. In one aspect, provided herein is an antibody that binds CD8, comprising a light chain having an amino acid sequence of SEQ ID NO:170. In one aspect, provided herein is an antibody that binds CD8, comprising a heavy chain having an amino acid sequence of SEQ ID NO:169, and a light chain having an amino acid sequence of SEQ ID NO:170. In one aspect, provided herein is an antibody that binds CD8, comprising a VH having an amino acid sequence having at least 95% identity to an amino acid sequence of SEQ ID NO:167. In one aspect, provided herein is an antibody that binds CD8, comprising a VL having an amino acid sequence having at least 95% identity to an amino acid sequence of SEQ ID NO:168. In one aspect, provided herein is an antibody that binds CD8, comprising a VH having an amino acid sequence having at least 95% identity to an amino acid sequence of SEQ ID NO:167, and a VL having an amino acid sequence having at least 95% identity to an amino acid sequence of SEQ ID NO:168. In one aspect, provided herein is an antibody that binds CD8, comprising a heavy chain having an amino acid sequence having at least 95% identity to an amino acid sequence of SEQ ID NO:169. In one aspect, provided herein is an antibody that binds CD8, comprising a light chain having an amino acid sequence having at least 95% identity to an amino acid sequence of SEQ ID NO:170. In one aspect, provided herein is an antibody that binds CD8, comprising a heavy chain having an amino acid sequence having at least 95% identity to an amino acid sequence of SEQ ID NO:169, and a light chain having an amino acid sequence having at least 95% identity to an amino acid sequence of SEQ ID NO:170.

[0194] In one embodiment, the first antigen binding domain that specifically binds CD8, comprises: (i) a VH comprising a VH CDR1, a VH CDR2, and a VH CDR3 having an amino acid sequence of SEQ ID NOs:171, 172, and 173, respectively, and (ii) a VL comprising a VL CDR1, VL CDR2, and VL CDR3 having an amino acid sequence of SEQ ID NOs:174, 175, and 176, respectively. In one embodiment, the first antigen binding domain that specifically binds CD8, comprises: (i) a VH comprising a VH CDR1, a VH CDR2, and a VH CDR3 having an amino acid sequence of SEQ ID NOs:177, 178, and 179, respectively, and (ii) a VL comprising a VL CDR1, VL CDR2, and VL CDR3 having an amino acid sequence of SEQ ID NOs:180, 181, and 182, respectively. In one embodiment, the first antigen binding domain that specifically binds CD8, comprises: (i) a VH comprising a VH CDR1, a VH CDR2, and a VH CDR3 having an amino acid sequence of SEQ ID NOs:183, 184, and 185, respectively, and (ii) a VL comprising a VL CDR1, VL CDR2, and VL CDR3 having an amino acid sequence of SEQ ID NOs:186, 187, and 188, respectively. In one embodiment, the first antigen binding domain that specifically binds CD8, comprises: (i) a VH comprising a VH CDR1, a VH CDR2, and a VH CDR3 having an amino acid sequence of SEQ ID NOs:189, 190, and 191, respectively, and (ii) a VL comprising a VL CDR1, VL CDR2, and VL CDR3 having an amino acid sequence of SEQ ID NOs:192, 193, and 194, respectively. In one embodiment, the first antigen binding domain that specifically binds CD8, comprises: (i) a VH comprising a VH CDR1, a VH CDR2, and a VH CDR3 having an amino acid sequence of SEQ ID NOs:195, 196, and 197, respectively, and (ii) a VL comprising a VL CDR1, VL CDR2, and VL CDR3 having an amino acid sequence of SEQ ID NOs:198, 199, and 200, respectively. In one embodiment, the first antigen binding domain that specifically binds CD8, comprises: (i) a VH comprising a VH CDR1, a VH CDR2, and a VH CDR3 having an amino acid sequence of a VH CDR1, a VH CDR2, and a VH CDR3, respectively, of a VH having an amino acid sequence of SEQ ID NO:201; and (ii) a VL comprising a VL CDR1, a VL CDR2, and a VL CDR3 having an amino acid sequence of a VL CDR1, a VL CDR2, and a VL CDR3, respectively, of a VL having an amino acid sequence of SEQ ID NO:202. In one aspect, provided herein is an antibody that binds CD8, comprising a VH having an amino acid sequence of SEQ ID NO:201. In one aspect, provided herein is an antibody that binds CD8, comprising a VL having an amino acid sequence of SEQ ID NO:202. In one aspect, provided herein is an antibody that binds CD8, comprising a VH having an amino acid sequence of SEQ ID NO:201, and a VL having an amino acid sequence of SEQ ID NO:202. In one aspect, provided herein is an antibody that binds CD8, comprising a heavy chain having an amino acid sequence of SEQ ID NO:203. In one aspect, provided herein is an antibody that binds CD8, comprising a light chain having an amino acid sequence of SEQ ID NO:204. In one aspect, provided herein is an antibody that binds CD8, comprising a heavy chain having an amino acid sequence of SEQ ID NO:203, and a light chain having an amino acid sequence of SEQ ID NO:204. In one aspect, provided herein is an antibody that binds CD8, comprising a VH having an amino acid sequence having at least 95% identity to an amino acid sequence of SEQ ID NO:201. In one aspect, provided herein is an antibody that binds CD8, comprising a VL having an amino acid sequence having at least 95% identity to an amino acid sequence of SEQ ID NO:202. In one aspect, provided herein is an antibody that binds CD8, comprising a VH having an amino acid sequence having at least 95% identity to an amino acid sequence of SEQ ID NO:201, and a VL having an amino acid sequence having at least 95% identity to an amino acid sequence of SEQ ID NO:202. In one aspect, provided herein is an antibody that binds CD8, comprising a heavy chain having an amino acid sequence having at least 95% identity to an amino acid sequence of SEQ ID NO:203. In one aspect, provided herein is an antibody that binds CD8, comprising a light chain having an amino acid sequence having at least 95% identity to an amino acid sequence of SEQ ID NO:204. In one aspect, provided herein is an antibody that binds CD8, comprising a heavy chain having an amino acid sequence having at least 95% identity to an amino acid sequence of SEQ ID NO:203, and a light chain having an amino acid sequence having at least 95% identity to an amino acid sequence of SEQ ID NO:204.

[0195] In one embodiment, the first antigen binding domain that specifically binds CD8, comprises: (i) a VH comprising a VH CDR1, a VH CDR2, and a VH CDR3 having an amino acid sequence of SEQ ID NOs:205, 206, and 207, respectively, and (ii) a VL comprising a VL CDR1, VL CDR2, and VL CDR3 having an amino acid sequence of SEQ ID NOs:208, 209, and 210, respectively. In one embodiment, the first antigen binding domain that specifically binds CD8, comprises: (i) a VH comprising a VH CDR1, a VH CDR2, and a VH CDR3 having an amino acid sequence of SEQ ID NOs:211, 212, and 213, respectively, and (ii) a VL comprising a VL CDR1, VL CDR2, and VL CDR3 having an amino acid sequence of SEQ ID NOs:214, 215, and 216, respectively. In one embodiment, the first antigen binding domain that specifically binds CD8, comprises: (i) a VH comprising a VH CDR1, a VH CDR2, and a VH CDR3 having an amino acid sequence of SEQ ID NOs:217, 218, and 219, respectively, and (ii) a VL comprising a VL CDR1, VL CDR2, and VL CDR3 having an amino acid sequence of SEQ ID NOs:220, 221, and 222, respectively. In one embodiment, the first antigen binding domain that specifically binds CD8, comprises: (i) a VH comprising a VH CDR1, a VH CDR2, and a VH CDR3 having an amino acid sequence of SEQ ID NOs:223, 224, and 225, respectively, and (ii) a VL comprising a VL CDR1, VL CDR2, and VL CDR3 having an amino acid sequence of SEQ ID NOs:226, 227, and 228, respectively. In one embodiment, the first antigen binding domain that specifically binds CD8, comprises: (i) a VH comprising a VH CDR1, a VH CDR2, and a VH CDR3 having an amino acid sequence of SEQ ID NOs:229, 230, and 231, respectively, and (ii) a VL comprising a VL CDR1, VL CDR2, and VL CDR3 having an amino acid sequence of SEQ ID NOs:232, 233, and 234, respectively. In one embodiment, the first antigen binding domain that specifically binds CD8, comprises: (i) a VH comprising a VH CDR1, a VH CDR2, and a VH CDR3 having an amino acid sequence of a VH CDR1, a VH CDR2, and a VH CDR3, respectively, of a VH having an amino acid sequence of SEQ ID NO:235; and (ii) a VL comprising a VL CDR1, a VL CDR2, and a VL CDR3 having an amino acid sequence of a VL CDR1, a VL CDR2, and a VL CDR3, respectively, of a VL having an amino acid sequence of SEQ ID NO:236. In one aspect, provided herein is an antibody that binds CD8, comprising a VH having an amino acid sequence of SEQ ID NO:235. In one aspect, provided herein is an antibody that binds CD8, comprising a VL having an amino acid sequence of SEQ ID NO:236. In one aspect, provided herein is an antibody that binds CD8, comprising a VH having an amino acid sequence of SEQ ID NO:235, and a VL having an amino acid sequence of SEQ ID NO:236. In one aspect, provided herein is an antibody that binds CD8, comprising a heavy chain having an amino acid sequence of SEQ ID NO:237. In one aspect, provided herein is an antibody that binds CD8, comprising a light chain having an amino acid sequence of SEQ ID NO:238. In one aspect, provided herein is an antibody that binds CD8, comprising a heavy chain having an amino acid sequence of SEQ ID NO:237, and a light chain having an amino acid sequence of SEQ ID NO:238. In one aspect, provided herein is an antibody that binds CD8, comprising a VH having an amino acid sequence having at least 95% identity to an amino acid sequence of SEQ ID NO:235. In one aspect, provided herein is an antibody that binds CD8, comprising a VL having an amino acid sequence having at least 95% identity to an amino acid sequence of SEQ ID NO:236. In one aspect, provided herein is an antibody that binds CD8, comprising a VH having an amino acid sequence having at least 95% identity to an amino acid sequence of SEQ ID NO:235, and a VL having an amino acid sequence having at least 95% identity to an amino acid sequence of SEQ ID NO:236. In one aspect, provided herein is an antibody that binds CD8, comprising a heavy chain having an amino acid sequence having at least 95% identity to an amino acid sequence of SEQ ID NO:237. In one aspect, provided herein is an antibody that binds CD8, comprising a light chain having an amino acid sequence having at least 95% identity to an amino acid sequence of SEQ ID NO:238. In one aspect, provided herein is an antibody that binds CD8, comprising a heavy chain having an amino acid sequence having at least 95% identity to an amino acid sequence of SEQ ID NO:237, and a light chain having an amino acid sequence having at least 95% identity to an amino acid sequence of SEQ ID NO:238.

[0196] In one embodiment, the first antigen binding domain that specifically binds CD8, comprises: (i) a VH comprising a VH CDR1, a VH CDR2, and a VH CDR3 having an amino acid sequence of SEQ ID NOs:239, 240, and 241, respectively, and (ii) a VL comprising a VL CDR1, VL CDR2, and VL CDR3 having an amino acid sequence of SEQ ID NOs:242, 243, and 244, respectively. In one embodiment, the first antigen binding domain that specifically binds CD8, comprises: (i) a VH comprising a VH CDR1, a VH CDR2, and a VH CDR3 having an amino acid sequence of SEQ ID NOs:245, 246, and 247, respectively, and (ii) a VL comprising a VL CDR1, VL CDR2, and VL CDR3 having an amino acid sequence of SEQ ID NOs:248, 249, and 250, respectively. In one embodiment, the first antigen binding domain that specifically binds CD8, comprises: (i) a VH comprising a VH CDR1, a VH CDR2, and a VH CDR3 having an amino acid sequence of SEQ ID NOs:251, 252, and 253, respectively, and (ii) a VL comprising a VL CDR1, VL CDR2, and VL CDR3 having an amino acid sequence of SEQ ID NOs:254, 255, and 256, respectively. In one embodiment, the first antigen binding domain that specifically binds CD8, comprises: (i) a VH comprising a VH CDR1, a VH CDR2, and a VH CDR3 having an amino acid sequence of SEQ ID NOs:257, 258, and 259, respectively, and (ii) a VL comprising a VL CDR1, VL CDR2, and VL CDR3 having an amino acid sequence of SEQ ID NOs:260, 261, and 262, respectively. In one embodiment, the first antigen binding domain that specifically binds CD8, comprises: (i) a VH comprising a VH CDR1, a VH CDR2, and a VH CDR3 having an amino acid sequence of SEQ ID NOs:263, 264, and 265, respectively, and (ii) a VL comprising a VL CDR1, VL CDR2, and VL CDR3 having an amino acid sequence of SEQ ID NOs:266, 267, and 268, respectively. In one embodiment, the first antigen binding domain that specifically binds CD8, comprises: (i) a VH comprising a VH CDR1, a VH CDR2, and a VH CDR3 having an amino acid sequence of a VH CDR1, a VH CDR2, and a VH CDR3, respectively, of a VH having an amino acid sequence of SEQ ID NO:269; and (ii) a VL comprising a VL CDR1, a VL CDR2, and a VL CDR3 having an amino acid sequence of a VL CDR1, a VL CDR2, and a VL CDR3, respectively, of a VL having an amino acid sequence of SEQ ID NO:270. In one aspect, provided herein is an antibody that binds CD8, comprising a VH having an amino acid sequence of SEQ ID NO:269. In one aspect, provided herein is an antibody that binds CD8, comprising a VL having an amino acid sequence of SEQ ID NO:270. In one aspect, provided herein is an antibody that binds CD8, comprising a VH having an amino acid sequence of SEQ ID NO:269, and a VL having an amino acid sequence of SEQ ID NO:270. In one aspect, provided herein is an antibody that binds CD8, comprising a heavy chain having an amino acid sequence of SEQ ID NO:271. In one aspect, provided herein is an antibody that binds CD8, comprising a light chain having an amino acid sequence of SEQ ID NO:272. In one aspect, provided herein is an antibody that binds CD8, comprising a heavy chain having an amino acid sequence of SEQ ID NO:271, and a light chain having an amino acid sequence of SEQ ID NO:272. In one aspect, provided herein is an antibody that binds CD8, comprising a VH having an amino acid sequence having at least 95% identity to an amino acid sequence of SEQ ID NO:269. In one aspect, provided herein is an antibody that binds CD8, comprising a VL having an amino acid sequence having at least 95% identity to an amino acid sequence of SEQ ID NO:270. In one aspect, provided herein is an antibody that binds CD8, comprising a VH having an amino acid sequence having at least 95% identity to an amino acid sequence of SEQ ID NO:269, and a VL having an amino acid sequence having at least 95% identity to an amino acid sequence of SEQ ID NO:270. In one aspect, provided herein is an antibody that binds CD8, comprising a heavy chain having an amino acid sequence having at least 95% identity to an amino acid sequence of SEQ ID NO:271. In one aspect, provided herein is an antibody that binds CD8, comprising a light chain having an amino acid sequence having at least 95% identity to an amino acid sequence of SEQ ID NO:272. In one aspect, provided herein is an antibody that binds CD8, comprising a heavy chain having an amino acid sequence having at least 95% identity to an amino acid sequence of SEQ ID NO:271, and a light chain having an amino acid sequence having at least 95% identity to an amino acid sequence of SEQ ID NO:272.

[0197] In one embodiment, the first antigen binding domain that specifically binds CD8, comprises: (i) a VH comprising a VH CDR1, a VH CDR2, and a VH CDR3 having an amino acid sequence of SEQ ID NOs:273, 274, and 275, respectively, and (ii) a VL comprising a VL CDR1, VL CDR2, and VL CDR3 having an amino acid sequence of SEQ ID NOs:276, 277, and 278, respectively. In one embodiment, the first antigen binding domain that specifically binds CD8, comprises: (i) a VH comprising a VH CDR1, a VH CDR2, and a VH CDR3 having an amino acid sequence of SEQ ID NOs:279, 280, and 281, respectively, and (ii) a VL comprising a VL CDR1, VL CDR2, and VL CDR3 having an amino acid sequence of SEQ ID NOs:282, 283, and 284, respectively. In one embodiment, the first antigen binding domain that specifically binds CD8, comprises: (i) a VH comprising a VH CDR1, a VH CDR2, and a VH CDR3 having an amino acid sequence of SEQ ID NOs:285, 286, and 287, respectively, and (ii) a VL comprising a VL CDR1, VL CDR2, and VL CDR3 having an amino acid sequence of SEQ ID NOs:288, 289, and 290, respectively. In one embodiment, the first antigen binding domain that specifically binds CD8, comprises: (i) a VH comprising a VH CDR1, a VH CDR2, and a VH CDR3 having an amino acid sequence of SEQ ID NOs:291, 292, and 293, respectively, and (ii) a VL comprising a VL CDR1, VL CDR2, and VL CDR3 having an amino acid sequence of SEQ ID NOs:294, 295, and 296, respectively. In one embodiment, the first antigen binding domain that specifically binds CD8, comprises: (i) a VH comprising a VH CDR1, a VH CDR2, and a VH CDR3 having an amino acid sequence of SEQ ID NOs:297, 298, and 299, respectively, and (ii) a VL comprising a VL CDR1, VL CDR2, and VL CDR3 having an amino acid sequence of SEQ ID NOs:300, 301, and 302, respectively. In one embodiment, the first antigen binding domain that specifically binds CD8, comprises: (i) a VH comprising a VH CDR1, a VH CDR2, and a VH CDR3 having an amino acid sequence of a VH CDR1, a VH CDR2, and a VH CDR3, respectively, of a VH having an amino acid sequence of SEQ ID NO:303; and (ii) a VL comprising a VL CDR1, a VL CDR2, and a VL CDR3 having an amino acid sequence of a VL CDR1, a VL CDR2, and a VL CDR3, respectively, of a VL having an amino acid sequence of SEQ ID NO:304. In one aspect, provided herein is an antibody that binds CD8, comprising a VH having an amino acid sequence of SEQ ID NO:303. In one aspect, provided herein is an antibody that binds CD8, comprising a VL having an amino acid sequence of SEQ ID NO:304. In one aspect, provided herein is an antibody that binds CD8, comprising a VH having an amino acid sequence of SEQ ID NO:303, and a VL having an amino acid sequence of SEQ ID NO:304. In one aspect, provided herein is an antibody that binds CD8, comprising a heavy chain having an amino acid sequence of SEQ ID NO:305. In one aspect, provided herein is an antibody that binds CD8, comprising a light chain having an amino acid sequence of SEQ ID NO:306. In one aspect, provided herein is an antibody that binds CD8, comprising a heavy chain having an amino acid sequence of SEQ ID NO:305, and a light chain having an amino acid sequence of SEQ ID NO:306. In one aspect, provided herein is an antibody that binds CD8, comprising a VH having an amino acid sequence having at least 95% identity to an amino acid sequence of SEQ ID NO:303. In one aspect, provided herein is an antibody that binds CD8, comprising a VL having an amino acid sequence having at least 95% identity to an amino acid sequence of SEQ ID NO:304. In one aspect, provided herein is an antibody that binds CD8, comprising a VH having an amino acid sequence having at least 95% identity to an amino acid sequence of SEQ ID NO:303, and a VL having an amino acid sequence having at least 95% identity to an amino acid sequence of SEQ ID NO:304. In one aspect, provided herein is an antibody that binds CD8, comprising a heavy chain having an amino acid sequence having at least 95% identity to an amino acid sequence of SEQ ID NO:305. In one aspect, provided herein is an antibody that binds CD8, comprising a light chain having an amino acid sequence having at least 95% identity to an amino acid sequence of SEQ ID NO:306. In one aspect, provided herein is an antibody that binds CD8, comprising a heavy chain having an amino acid sequence having at least 95% identity to an amino acid sequence of SEQ ID NO:305, and a light chain having an amino acid sequence having at least 95% identity to an amino acid sequence of SEQ ID NO:306.

[0198] In one embodiment, the first antigen binding domain that specifically binds CD8, comprises: (i) a VH comprising a VH CDR1, a VH CDR2, and a VH CDR3 having an amino acid sequence of SEQ ID NOs:307, 308, and 309, respectively, and (ii) a VL comprising a VL CDR1, VL CDR2, and VL CDR3 having an amino acid sequence of SEQ ID NOs:310, 311, and 312, respectively. In one embodiment, the first antigen binding domain that specifically binds CD8, comprises: (i) a VH comprising a VH CDR1, a VH CDR2, and a VH CDR3 having an amino acid sequence of SEQ ID NOs:313, 314, and 315, respectively, and (ii) a VL comprising a VL CDR1, VL CDR2, and VL CDR3 having an amino acid sequence of SEQ ID NOs:316, 317, and 318, respectively. In one embodiment, the first antigen binding domain that specifically binds CD8, comprises: (i) a VH comprising a VH CDR1, a VH CDR2, and a VH CDR3 having an amino acid sequence of SEQ ID NOs:319, 320, and 321, respectively, and (ii) a VL comprising a VL CDR1, VL CDR2, and VL CDR3 having an amino acid sequence of SEQ ID NOs:322, 323, and 324, respectively. In one embodiment, the first antigen binding domain that specifically binds CD8, comprises: (i) a VH comprising a VH CDR1, a VH CDR2, and a VH CDR3 having an amino acid sequence of SEQ ID NOs:325, 326, and 327, respectively, and (ii) a VL comprising a VL CDR1, VL CDR2, and VL CDR3 having an amino acid sequence of SEQ ID NOs:328, 329, and 330, respectively. In one embodiment, the first antigen binding domain that specifically binds CD8, comprises: (i) a VH comprising a VH CDR1, a VH CDR2, and a VH CDR3 having an amino acid sequence of SEQ ID NOs:331, 332, and 333, respectively, and (ii) a VL comprising a VL CDR1, VL CDR2, and VL CDR3 having an amino acid sequence of SEQ ID NOs:334, 335, and 336, respectively. In one embodiment, the first antigen binding domain that specifically binds CD8, comprises: (i) a VH comprising a VH CDR1, a VH CDR2, and a VH CDR3 having an amino acid sequence of a VH CDR1, a VH CDR2, and a VH CDR3, respectively, of a VH having an amino acid sequence of SEQ ID NO:337; and (ii) a VL comprising a VL CDR1, a VL CDR2, and a VL CDR3 having an amino acid sequence of a VL CDR1, a VL CDR2, and a VL CDR3, respectively, of a VL having an amino acid sequence of SEQ ID NO:338. In one aspect, provided herein is an antibody that binds CD8, comprising a VH having an amino acid sequence of SEQ ID NO:337. In one aspect, provided herein is an antibody that binds CD8, comprising a VL having an amino acid sequence of SEQ ID NO:338. In one aspect, provided herein is an antibody that binds CD8, comprising a VH having an amino acid sequence of SEQ ID NO:337, and a VL having an amino acid sequence of SEQ ID NO:338. In one aspect, provided herein is an antibody that binds CD8, comprising a heavy chain having an amino acid sequence of SEQ ID NO:339. In one aspect, provided herein is an antibody that binds CD8, comprising a light chain having an amino acid sequence of SEQ ID NO:340. In one aspect, provided herein is an antibody that binds CD8, comprising a heavy chain having an amino acid sequence of SEQ ID NO:339, and a light chain having an amino acid sequence of SEQ ID NO:340. In one aspect, provided herein is an antibody that binds CD8, comprising a VH having an amino acid sequence having at least 95% identity to an amino acid sequence of SEQ ID NO:337. In one aspect, provided herein is an antibody that binds CD8, comprising a VL having an amino acid sequence having at least 95% identity to an amino acid sequence of SEQ ID NO:338. In one aspect, provided herein is an antibody that binds CD8, comprising a VH having an amino acid sequence having at least 95% identity to an amino acid sequence of SEQ ID NO:337, and a VL having an amino acid sequence having at least 95% identity to an amino acid sequence of SEQ ID NO:338. In one aspect, provided herein is an antibody that binds CD8, comprising a heavy chain having an amino acid sequence having at least 95% identity to an amino acid sequence of SEQ ID NO:339. In one aspect, provided herein is an antibody that binds CD8, comprising a light chain having an amino acid sequence having at least 95% identity to an amino acid sequence of SEQ ID NO:340. In one aspect, provided herein is an antibody that binds CD8, comprising a heavy chain having an amino acid sequence having at least 95% identity to an amino acid sequence of SEQ ID NO:339, and a light chain having an amino acid sequence having at least 95% identity to an amino acid sequence of SEQ ID NO:340.

[0199] In one embodiment, the first antigen binding domain that specifically binds CD8, comprises: (i) a VH comprising a VH CDR1, a VH CDR2, and a VH CDR3 having an amino acid sequence of SEQ ID NOs:341, 342, and 343, respectively, and (ii) a VL comprising a VL CDR1, VL CDR2, and VL CDR3 having an amino acid sequence of SEQ ID NOs:344, 345, and 346, respectively. In one embodiment, the first antigen binding domain that specifically binds CD8, comprises: (i) a VH comprising a VH CDR1, a VH CDR2, and a VH CDR3 having an amino acid sequence of SEQ ID NOs:347, 348, and 349, respectively, and (ii) a VL comprising a VL CDR1, VL CDR2, and VL CDR3 having an amino acid sequence of SEQ ID NOs:350, 351, and 352, respectively. In one embodiment, the first antigen binding domain that specifically binds CD8, comprises: (i) a VH comprising a VH CDR1, a VH CDR2, and a VH CDR3 having an amino acid sequence of SEQ ID NOs:353, 354, and 355, respectively, and (ii) a VL comprising a VL CDR1, VL CDR2, and VL CDR3 having an amino acid sequence of SEQ ID NOs:356, 357, and 358, respectively. In one embodiment, the first antigen binding domain that specifically binds CD8, comprises: (i) a VH comprising a VH CDR1, a VH CDR2, and a VH CDR3 having an amino acid sequence of SEQ ID NOs:359, 360, and 361, respectively, and (ii) a VL comprising a VL CDR1, VL CDR2, and VL CDR3 having an amino acid sequence of SEQ ID NOs:362, 363, and 364, respectively. In one embodiment, the first antigen binding domain that specifically binds CD8, comprises: (i) a VH comprising a VH CDR1, a VH CDR2, and a VH CDR3 having an amino acid sequence of SEQ ID NOs:365, 366, and 367, respectively, and (ii) a VL comprising a VL CDR1, VL CDR2, and VL CDR3 having an amino acid sequence of SEQ ID NOs:368, 369, and 370, respectively. In one embodiment, the first antigen binding domain that specifically binds CD8, comprises: (i) a VH comprising a VH CDR1, a VH CDR2, and a VH CDR3 having an amino acid sequence of a VH CDR1, a VH CDR2, and a VH CDR3, respectively, of a VH having an amino acid sequence of SEQ ID NO:371; and (ii) a VL comprising a VL CDR1, a VL CDR2, and a VL CDR3 having an amino acid sequence of a VL CDR1, a VL CDR2, and a VL CDR3, respectively, of a VL having an amino acid sequence of SEQ ID NO:372. In one aspect, provided herein is an antibody that binds CD8, comprising a VH having an amino acid sequence of SEQ ID NO:371. In one aspect, provided herein is an antibody that binds CD8, comprising a VL having an amino acid sequence of SEQ ID NO:372. In one aspect, provided herein is an antibody that binds CD8, comprising a VH having an amino acid sequence of SEQ ID NO:371, and a VL having an amino acid sequence of SEQ ID NO:372. In one aspect, provided herein is an antibody that binds CD8, comprising a heavy chain having an amino acid sequence of SEQ ID NO:373. In one aspect, provided herein is an antibody that binds CD8, comprising a light chain having an amino acid sequence of SEQ ID NO:374. In one aspect, provided herein is an antibody that binds CD8, comprising a heavy chain having an amino acid sequence of SEQ ID NO:373, and a light chain having an amino acid sequence of SEQ ID NO:374. In one aspect, provided herein is an antibody that binds CD8, comprising a VH having an amino acid sequence having at least 95% identity to an amino acid sequence of SEQ ID NO:371. In one aspect, provided herein is an antibody that binds CD8, comprising a VL having an amino acid sequence having at least 95% identity to an amino acid sequence of SEQ ID NO:372. In one aspect, provided herein is an antibody that binds CD8, comprising a VH having an amino acid sequence having at least 95% identity to an amino acid sequence of SEQ ID NO:371, and a VL having an amino acid sequence having at least 95% identity to an amino acid sequence of SEQ ID NO:372. In one aspect, provided herein is an antibody that binds CD8, comprising a heavy chain having an amino acid sequence having at least 95% identity to an amino acid sequence of SEQ ID NO:373. In one aspect, provided herein is an antibody that binds CD8, comprising a light chain having an amino acid sequence having at least 95% identity to an amino acid sequence of SEQ ID NO:374. In one aspect, provided herein is an antibody that binds CD8, comprising a heavy chain having an amino acid sequence having at least 95% identity to an amino acid sequence of SEQ ID NO:373, and a light chain having an amino acid sequence having at least 95% identity to an amino acid sequence of SEQ ID NO:374.

[0200] In one embodiment, the first antigen binding domain that specifically binds CD8, comprises: (i) a VH comprising a VH CDR1, a VH CDR2, and a VH CDR3 having an amino acid sequence of SEQ ID NOs:375, 376, and 377, respectively, and (ii) a VL comprising a VL CDR1, VL CDR2, and VL CDR3 having an amino acid sequence of SEQ ID NOs:378, 379, and 380, respectively. In one embodiment, the first antigen binding domain that specifically binds CD8, comprises: (i) a VH comprising a VH CDR1, a VH CDR2, and a VH CDR3 having an amino acid sequence of SEQ ID NOs:381, 382, and 383, respectively, and (ii) a VL comprising a VL CDR1, VL CDR2, and VL CDR3 having an amino acid sequence of SEQ ID NOs:384, 385, and 386, respectively. In one embodiment, the first antigen binding domain that specifically binds CD8, comprises: (i) a VH comprising a VH CDR1, a VH CDR2, and a VH CDR3 having an amino acid sequence of SEQ ID NOs:387, 388, and 389, respectively, and (ii) a VL comprising a VL CDR1, VL CDR2, and VL CDR3 having an amino acid sequence of SEQ ID NOs:390, 391, and 392, respectively. In one embodiment, the first antigen binding domain that specifically binds CD8, comprises: (i) a VH comprising a VH CDR1, a VH CDR2, and a VH CDR3 having an amino acid sequence of SEQ ID NOs:393, 394, and 395, respectively, and (ii) a VL comprising a VL CDR1, VL CDR2, and VL CDR3 having an amino acid sequence of SEQ ID NOs:396, 397, and 398, respectively. In one embodiment, the first antigen binding domain that specifically binds CD8, comprises: (i) a VH comprising a VH CDR1, a VH CDR2, and a VH CDR3 having an amino acid sequence of SEQ ID NOs:399, 400, and 401, respectively, and (ii) a VL comprising a VL CDR1, VL CDR2, and VL CDR3 having an amino acid sequence of SEQ ID NOs:402, 403, and 404, respectively. In one embodiment, the first antigen binding domain that specifically binds CD8, comprises: (i) a VH comprising a VH CDR1, a VH CDR2, and a VH CDR3 having an amino acid sequence of a VH CDR1, a VH CDR2, and a VH CDR3, respectively, of a VH having an amino acid sequence of SEQ ID NO:405; and (ii) a VL comprising a VL CDR1, a VL CDR2, and a VL CDR3 having an amino acid sequence of a VL CDR1, a VL CDR2, and a VL CDR3, respectively, of a VL having an amino acid sequence of SEQ ID NO:406. In one aspect, provided herein is an antibody that binds CD8, comprising a VH having an amino acid sequence of SEQ ID NO:405. In one embodiment, the first antigen binding domain that specifically binds CD8, comprises a VL having an amino acid sequence of SEQ ID NO:406. In one embodiment, the first antigen binding domain that specifically binds CD8, comprises a VH having an amino acid sequence of SEQ ID NO:405, and a VL having an amino acid sequence of SEQ ID NO:406. In one embodiment, the first antigen binding domain that specifically binds CD8, comprises a heavy chain having an amino acid sequence of SEQ ID NO:407. In one embodiment, the first antigen binding domain that specifically binds CD8, comprises a light chain having an amino acid sequence of SEQ ID NO:408. In one embodiment, the first antigen binding domain that specifically binds CD8, comprises a heavy chain having an amino acid sequence of SEQ ID NO:407, and a light chain having an amino acid sequence of SEQ ID NO:408. In one embodiment, the first antigen binding domain that specifically binds CD8, comprises a VH having an amino acid sequence having at least 95% identity to an amino acid sequence of SEQ ID NO:405. In one embodiment, the first antigen binding domain that specifically binds CD8, comprises a VL having an amino acid sequence having at least 95% identity to an amino acid sequence of SEQ ID NO:406. In one embodiment, the first antigen binding domain that specifically binds CD8, comprises a VH having an amino acid sequence having at least 95% identity to an amino acid sequence of SEQ ID NO:405, and a VL having an amino acid sequence having at least 95% identity to an amino acid sequence of SEQ ID NO:406. In one embodiment, the first antigen binding domain that specifically binds CD8, comprises a heavy chain having an amino acid sequence having at least 95% identity to an amino acid sequence of SEQ ID NO:407. In one embodiment, the first antigen binding domain that specifically binds CD8, comprises a light chain having an amino acid sequence having at least 95% identity to an amino acid sequence of SEQ ID NO:408. In one embodiment, the first antigen binding domain that specifically binds CD8, comprises a heavy chain having an amino acid sequence having at least 95% identity to an amino acid sequence of SEQ ID NO:407, and a light chain having an amino acid sequence having at least 95% identity to an amino acid sequence of SEQ ID NO:408.

[0201] In one embodiment, the first antigen binding domain that specifically binds CD8, comprises: (i) a VH comprising a VH CDR1, a VH CDR2, and a VH CDR3 having an amino acid sequence of SEQ ID NOs:409, 410, and 411, respectively, and (ii) a VL comprising a VL CDR1, VL CDR2, and VL CDR3 having an amino acid sequence of SEQ ID NOs:412, 413, and 414, respectively. In one embodiment, the first antigen binding domain that specifically binds CD8, comprises: (i) a VH comprising a VH CDR1, a VH CDR2, and a VH CDR3 having an amino acid sequence of SEQ ID NOs:415, 416, and 417, respectively, and (ii) a VL comprising a VL CDR1, VL CDR2, and VL CDR3 having an amino acid sequence of SEQ ID NOs:418, 419, and 420, respectively. In one embodiment, the first antigen binding domain that specifically binds CD8, comprises: (i) a VH comprising a VH CDR1, a VH CDR2, and a VH CDR3 having an amino acid sequence of SEQ ID NOs:421, 422, and 423, respectively, and (ii) a VL comprising a VL CDR1, VL CDR2, and VL CDR3 having an amino acid sequence of SEQ ID NOs:424, 425, and 426, respectively. In one embodiment, the first antigen binding domain that specifically binds CD8, comprises: (i) a VH comprising a VH CDR1, a VH CDR2, and a VH CDR3 having an amino acid sequence of SEQ ID NOs:427, 428, and 429, respectively, and (ii) a VL comprising a VL CDR1, VL CDR2, and VL CDR3 having an amino acid sequence of SEQ ID NOs:430, 431, and 432, respectively. In one embodiment, the first antigen binding domain that specifically binds CD8, comprises: (i) a VH comprising a VH CDR1, a VH CDR2, and a VH CDR3 having an amino acid sequence of SEQ ID NOs:433, 434, and 435, respectively, and (ii) a VL comprising a VL CDR1, VL CDR2, and VL CDR3 having an amino acid sequence of SEQ ID NOs:436, 437, and 438, respectively. In one embodiment, the first antigen binding domain that specifically binds CD8, comprises: (i) a VH comprising a VH CDR1, a VH CDR2, and a VH CDR3 having an amino acid sequence of a VH CDR1, a VH CDR2, and a VH CDR3, respectively, of a VH having an amino acid sequence of SEQ ID NO:439; and (ii) a VL comprising a VL CDR1, a VL CDR2, and a VL CDR3 having an amino acid sequence of a VL CDR1, a VL CDR2, and a VL CDR3, respectively, of a VL having an amino acid sequence of SEQ ID NO:440. In one embodiment, the first antigen binding domain that specifically binds CD8, comprises a VH having an amino acid sequence of SEQ ID NO:439. In one embodiment, the first antigen binding domain that specifically binds CD8, comprises a VL having an amino acid sequence of SEQ ID NO:440. In one embodiment, the first antigen binding domain that specifically binds CD8, comprises a VH having an amino acid sequence of SEQ ID NO:439, and a VL having an amino acid sequence of SEQ ID NO:440. In one embodiment, the first antigen binding domain that specifically binds CD8, comprises a heavy chain having an amino acid sequence of SEQ ID NO:441. In one embodiment, the first antigen binding domain that specifically binds CD8, comprises a light chain having an amino acid sequence of SEQ ID NO:442. In one embodiment, the first antigen binding domain that specifically binds CD8, comprises a heavy chain having an amino acid sequence of SEQ ID NO:441, and a light chain having an amino acid sequence of SEQ ID NO:442. In one embodiment, the first antigen binding domain that specifically binds CD8, comprises a VH having an amino acid sequence having at least 95% identity to an amino acid sequence of SEQ ID NO:439. In one embodiment, the first antigen binding domain that specifically binds CD8, comprises a VL having an amino acid sequence having at least 95% identity to an amino acid sequence of SEQ ID NO:440. In one embodiment, the first antigen binding domain that specifically binds CD8, comprises a VH having an amino acid sequence having at least 95% identity to an amino acid sequence of SEQ ID NO:439, and a VL having an amino acid sequence having at least 95% identity to an amino acid sequence of SEQ ID NO:440. In one embodiment, the first antigen binding domain that specifically binds CD8, comprises a heavy chain having an amino acid sequence having at least 95% identity to an amino acid sequence of SEQ ID NO:441. In one embodiment, the first antigen binding domain that specifically binds CD8, comprises a light chain having an amino acid sequence having at least 95% identity to an amino acid sequence of SEQ ID NO:442. In one embodiment, the first antigen binding domain that specifically binds CD8, comprises a heavy chain having an amino acid sequence having at least 95% identity to an amino acid sequence of SEQ ID NO:441, and a light chain having an amino acid sequence having at least 95% identity to an amino acid sequence of SEQ ID NO:442.

[0202] In one embodiment, the first antigen binding domain that specifically binds CD8, comprises: (i) a VH comprising a VH CDR1, a VH CDR2, and a VH CDR3 having an amino acid sequence of SEQ ID NOs:443, 444, and 445, respectively, and (ii) a VL comprising a VL CDR1, VL CDR2, and VL CDR3 having an amino acid sequence of SEQ ID NOs:446, 447, and 448, respectively. In one embodiment, the first antigen binding domain that specifically binds CD8, comprises: (i) a VH comprising a VH CDR1, a VH CDR2, and a VH CDR3 having an amino acid sequence of SEQ ID NOs:449, 450, and 451, respectively, and (ii) a VL comprising a VL CDR1, VL CDR2, and VL CDR3 having an amino acid sequence of SEQ ID NOs:452, 453, and 454, respectively. In one embodiment, the first antigen binding domain that specifically binds CD8, comprises: (i) a VH comprising a VH CDR1, a VH CDR2, and a VH CDR3 having an amino acid sequence of SEQ ID NOs:455, 456, and 457, respectively, and (ii) a VL comprising a VL CDR1, VL CDR2, and VL CDR3 having an amino acid sequence of SEQ ID NOs:458, 459, and 460, respectively. In one embodiment, the first antigen binding domain that specifically binds CD8, comprises: (i) a VH comprising a VH CDR1, a VH CDR2, and a VH CDR3 having an amino acid sequence of SEQ ID NOs:461, 462, and 463, respectively, and (ii) a VL comprising a VL CDR1, VL CDR2, and VL CDR3 having an amino acid sequence of SEQ ID NOs:464, 465, and 466, respectively. In one embodiment, the first antigen binding domain that specifically binds CD8, comprises: (i) a VH comprising a VH CDR1, a VH CDR2, and a VH CDR3 having an amino acid sequence of SEQ ID NOs:467, 468, and 469, respectively, and (ii) a VL comprising a VL CDR1, VL CDR2, and VL CDR3 having an amino acid sequence of SEQ ID NOs:470, 471, and 472, respectively. In one embodiment, the first antigen binding domain that specifically binds CD8, comprises: (i) a VH comprising a VH CDR1, a VH CDR2, and a VH CDR3 having an amino acid sequence of a VH CDR1, a VH CDR2, and a VH CDR3, respectively, of a VH having an amino acid sequence of SEQ ID NO:473; and (ii) a VL comprising a VL CDR1, a VL CDR2, and a VL CDR3 having an amino acid sequence of a VL CDR1, a VL CDR2, and a VL CDR3, respectively, of a VL having an amino acid sequence of SEQ ID NO:474. In one embodiment, the first antigen binding domain that specifically binds CD8, comprises a VH having an amino acid sequence of SEQ ID NO:473. In one embodiment, the first antigen binding domain that specifically binds CD8, comprises a VL having an amino acid sequence of SEQ ID NO:474. In one embodiment, the first antigen binding domain that specifically binds CD8, comprises a VH having an amino acid sequence of SEQ ID NO:473, and a VL having an amino acid sequence of SEQ ID NO:474. In one embodiment, the first antigen binding domain that specifically binds CD8, comprises a heavy chain having an amino acid sequence of SEQ ID NO:475. In one embodiment, the first antigen binding domain that specifically binds CD8, comprises a light chain having an amino acid sequence of SEQ ID NO:476. In one embodiment, the first antigen binding domain that specifically binds CD8, comprises a heavy chain having an amino acid sequence of SEQ ID NO:475, and a light chain having an amino acid sequence of SEQ ID NO:476. In one embodiment, the first antigen binding domain that specifically binds CD8, comprises a VH having an amino acid sequence having at least 95% identity to an amino acid sequence of SEQ ID NO:473. In one embodiment, the first antigen binding domain that specifically binds CD8, comprises a VL having an amino acid sequence having at least 95% identity to an amino acid sequence of SEQ ID NO:474. In one embodiment, the first antigen binding domain that specifically binds CD8, comprises a VH having an amino acid sequence having at least 95% identity to an amino acid sequence of SEQ ID NO:473, and a VL having an amino acid sequence having at least 95% identity to an amino acid sequence of SEQ ID NO:474. In one embodiment, the first antigen binding domain that specifically binds CD8, comprises a heavy chain having an amino acid sequence having at least 95% identity to an amino acid sequence of SEQ ID NO:475. In one embodiment, the first antigen binding domain that specifically binds CD8, comprises a light chain having an amino acid sequence having at least 95% identity to an amino acid sequence of SEQ ID NO:476. In one embodiment, the first antigen binding domain that specifically binds CD8, comprises a heavy chain having an amino acid sequence having at least 95% identity to an amino acid sequence of SEQ ID NO:475, and a light chain having an amino acid sequence having at least 95% identity to an amino acid sequence of SEQ ID NO:476.

[0203] In one embodiment, the first antigen binding domain that specifically binds CD8, comprises: (i) a VH comprising a VH CDR1, a VH CDR2, and a VH CDR3 having an amino acid sequence of SEQ ID NOs:477, 478, and 479, respectively, and (ii) a VL comprising a VL CDR1, VL CDR2, and VL CDR3 having an amino acid sequence of SEQ ID NOs:480, 481, and 482, respectively. In one embodiment, the first antigen binding domain that specifically binds CD8, comprises: (i) a VH comprising a VH CDR1, a VH CDR2, and a VH CDR3 having an amino acid sequence of SEQ ID NOs:483, 484, and 485, respectively, and (ii) a VL comprising a VL CDR1, VL CDR2, and VL CDR3 having an amino acid sequence of SEQ ID NOs:486, 487, and 488, respectively. In one embodiment, the first antigen binding domain that specifically binds CD8, comprises: (i) a VH comprising a VH CDR1, a VH CDR2, and a VH CDR3 having an amino acid sequence of SEQ ID NOs:489, 490, and 491, respectively, and (ii) a VL comprising a VL CDR1, VL CDR2, and VL CDR3 having an amino acid sequence of SEQ ID NOs:492, 493, and 494, respectively. In one embodiment, the first antigen binding domain that specifically binds CD8, comprises: (i) a VH comprising a VH CDR1, a VH CDR2, and a VH CDR3 having an amino acid sequence of SEQ ID NOs:495, 496, and 497, respectively, and (ii) a VL comprising a VL CDR1, VL CDR2, and VL CDR3 having an amino acid sequence of SEQ ID NOs:498, 499, and 500, respectively. In one embodiment, the first antigen binding domain that specifically binds CD8, comprises: (i) a VH comprising a VH CDR1, a VH CDR2, and a VH CDR3 having an amino acid sequence of SEQ ID NOs:501, 502, and 503, respectively, and (ii) a VL comprising a VL CDR1, VL CDR2, and VL CDR3 having an amino acid sequence of SEQ ID NOs:504, 505, and 506, respectively. In one embodiment, the first antigen binding domain that specifically binds CD8, comprises: (i) a VH comprising a VH CDR1, a VH CDR2, and a VH CDR3 having an amino acid sequence of a VH CDR1, a VH CDR2, and a VH CDR3, respectively, of a VH having an amino acid sequence of SEQ ID NO:507; and (ii) a VL comprising a VL CDR1, a VL CDR2, and a VL CDR3 having an amino acid sequence of a VL CDR1, a VL CDR2, and a VL CDR3, respectively, of a VL having an amino acid sequence of SEQ ID NO:508. In one embodiment, the first antigen binding domain that specifically binds CD8, comprises a VH having an amino acid sequence of SEQ ID NO:507. In one embodiment, the first antigen binding domain that specifically binds CD8, comprises a VL having an amino acid sequence of SEQ ID NO:508. In one embodiment, the first antigen binding domain that specifically binds CD8, comprises a VH having an amino acid sequence of SEQ ID NO:507, and a VL having an amino acid sequence of SEQ ID NO:508. In one embodiment, the first antigen binding domain that specifically binds CD8, comprises a heavy chain having an amino acid sequence of SEQ ID NO:509. In one embodiment, the first antigen binding domain that specifically binds CD8, comprises a light chain having an amino acid sequence of SEQ ID NO:510. In one embodiment, the first antigen binding domain that specifically binds CD8, comprises a heavy chain having an amino acid sequence of SEQ ID NO:509, and a light chain having an amino acid sequence of SEQ ID NO:510. In one embodiment, the first antigen binding domain that specifically binds CD8, comprises a VH having an amino acid sequence having at least 95% identity to an amino acid sequence of SEQ ID NO:507. In one embodiment, the first antigen binding domain that specifically binds CD8, comprises a VL having an amino acid sequence having at least 95% identity to an amino acid sequence of SEQ ID NO:508. In one embodiment, the first antigen binding domain that specifically binds CD8, comprises a VH having an amino acid sequence having at least 95% identity to an amino acid sequence of SEQ ID NO:507, and a VL having an amino acid sequence having at least 95% identity to an amino acid sequence of SEQ ID NO:508. In one embodiment, the first antigen binding domain that specifically binds CD8, comprises a heavy chain having an amino acid sequence having at least 95% identity to an amino acid sequence of SEQ ID NO:509. In one embodiment, the first antigen binding domain that specifically binds CD8, comprises a light chain having an amino acid sequence having at least 95% identity to an amino acid sequence of SEQ ID NO:510. In one embodiment, the first antigen binding domain that specifically binds CD8, comprises a heavy chain having an amino acid sequence having at least 95% identity to an amino acid sequence of SEQ ID NO:509, and a light chain having an amino acid sequence having at least 95% identity to an amino acid sequence of SEQ ID NO:510.

[0204] In one embodiment, the first antigen binding domain that specifically binds CD8, comprises: (i) a VH comprising a VH CDR1, a VH CDR2, and a VH CDR3 having an amino acid sequence of SEQ ID NOs:511, 512, and 513, respectively, and (ii) a VL comprising a VL CDR1, VL CDR2, and VL CDR3 having an amino acid sequence of SEQ ID NOs:514, 515, and 516, respectively. In one embodiment, the first antigen binding domain that specifically binds CD8, comprises: (i) a VH comprising a VH CDR1, a VH CDR2, and a VH CDR3 having an amino acid sequence of SEQ ID NOs:517, 518, and 519, respectively, and (ii) a VL comprising a VL CDR1, VL CDR2, and VL CDR3 having an amino acid sequence of SEQ ID NOs:520, 521, and 522, respectively. In one embodiment, the first antigen binding domain that specifically binds CD8, comprises: (i) a VH comprising a VH CDR1, a VH CDR2, and a VH CDR3 having an amino acid sequence of SEQ ID NOs:523, 524, and 525, respectively, and (ii) a VL comprising a VL CDR1, VL CDR2, and VL CDR3 having an amino acid sequence of SEQ ID NOs:526, 527, and 528, respectively. In one embodiment, the first antigen binding domain that specifically binds CD8, comprises: (i) a VH comprising a VH CDR1, a VH CDR2, and a VH CDR3 having an amino acid sequence of SEQ ID NOs:529, 530, and 531, respectively, and (ii) a VL comprising a VL CDR1, VL CDR2, and VL CDR3 having an amino acid sequence of SEQ ID NOs:532, 533, and 534, respectively. In one embodiment, the first antigen binding domain that specifically binds CD8, comprises: (i) a VH comprising a VH CDR1, a VH CDR2, and a VH CDR3 having an amino acid sequence of SEQ ID NOs:535, 536, and 537, respectively, and (ii) a VL comprising a VL CDR1, VL CDR2, and VL CDR3 having an amino acid sequence of SEQ ID NOs:538, 539, and 540, respectively. In one embodiment, the first antigen binding domain that specifically binds CD8, comprises: (i) a VH comprising a VH CDR1, a VH CDR2, and a VH CDR3 having an amino acid sequence of a VH CDR1, a VH CDR2, and a VH CDR3, respectively, of a VH having an amino acid sequence of SEQ ID NO:541; and (ii) a VL comprising a VL CDR1, a VL CDR2, and a VL CDR3 having an amino acid sequence of a VL CDR1, a VL CDR2, and a VL CDR3, respectively, of a VL having an amino acid sequence of SEQ ID NO:542. In one embodiment, the first antigen binding domain that specifically binds CD8, comprises a VH having an amino acid sequence of SEQ ID NO:541. In one embodiment, the first antigen binding domain that specifically binds CD8, comprises a VL having an amino acid sequence of SEQ ID NO:542. In one embodiment, the first antigen binding domain that specifically binds CD8, comprises a VH having an amino acid sequence of SEQ ID NO:541, and a VL having an amino acid sequence of SEQ ID NO:542. In one embodiment, the first antigen binding domain that specifically binds CD8, comprises a heavy chain having an amino acid sequence of SEQ ID NO:543. In one embodiment, the first antigen binding domain that specifically binds CD8, comprises a light chain having an amino acid sequence of SEQ ID NO:544. In one embodiment, the first antigen binding domain that specifically binds CD8, comprises a heavy chain having an amino acid sequence of SEQ ID NO:543, and a light chain having an amino acid sequence of SEQ ID NO:544. In one embodiment, the first antigen binding domain that specifically binds CD8, comprises a VH having an amino acid sequence having at least 95% identity to an amino acid sequence of SEQ ID NO:541. In one embodiment, the first antigen binding domain that specifically binds CD8, comprises a VL having an amino acid sequence having at least 95% identity to an amino acid sequence of SEQ ID NO:542. In one embodiment, the first antigen binding domain that specifically binds CD8, comprises a VH having an amino acid sequence having at least 95% identity to an amino acid sequence of SEQ ID NO:541, and a VL having an amino acid sequence having at least 95% identity to an amino acid sequence of SEQ ID NO:542. In one embodiment, the first antigen binding domain that specifically binds CD8, comprises a heavy chain having an amino acid sequence having at least 95% identity to an amino acid sequence of SEQ ID NO:543. In one embodiment, the first antigen binding domain that specifically binds CD8, comprises a light chain having an amino acid sequence having at least 95% identity to an amino acid sequence of SEQ ID NO:544. In one embodiment, the first antigen binding domain that specifically binds CD8, comprises a heavy chain having an amino acid sequence having at least 95% identity to an amino acid sequence of SEQ ID NO:543, and a light chain having an amino acid sequence having at least 95% identity to an amino acid sequence of SEQ ID NO:544.

[0205] In one embodiment, the first antigen binding domain that specifically binds CD8, comprises: (i) a VH comprising a VH CDR1, a VH CDR2, and a VH CDR3 having an amino acid sequence of SEQ ID NOs:545, 546, and 547, respectively, and (ii) a VL comprising a VL CDR1, VL CDR2, and VL CDR3 having an amino acid sequence of SEQ ID NOs:548, 549, and 550, respectively. In one embodiment, the first antigen binding domain that specifically binds CD8, comprises: (i) a VH comprising a VH CDR1, a VH CDR2, and a VH CDR3 having an amino acid sequence of SEQ ID NOs:551, 552, and 553, respectively, and (ii) a VL comprising a VL CDR1, VL CDR2, and VL CDR3 having an amino acid sequence of SEQ ID NOs:554, 555, and 556, respectively. In one embodiment, the first antigen binding domain that specifically binds CD8, comprises: (i) a VH comprising a VH CDR1, a VH CDR2, and a VH CDR3 having an amino acid sequence of SEQ ID NOs:557, 558, and 559, respectively, and (ii) a VL comprising a VL CDR1, VL CDR2, and VL CDR3 having an amino acid sequence of SEQ ID NOs:560, 561, and 562, respectively. In one embodiment, the first antigen binding domain that specifically binds CD8, comprises: (i) a VH comprising a VH CDR1, a VH CDR2, and a VH CDR3 having an amino acid sequence of SEQ ID NOs:563, 564, and 565, respectively, and (ii) a VL comprising a VL CDR1, VL CDR2, and VL CDR3 having an amino acid sequence of SEQ ID NOs:566, 567, and 568, respectively. In one embodiment, the first antigen binding domain that specifically binds CD8, comprises: (i) a VH comprising a VH CDR1, a VH CDR2, and a VH CDR3 having an amino acid sequence of SEQ ID NOs:569, 570, and 571, respectively, and (ii) a VL comprising a VL CDR1, VL CDR2, and VL CDR3 having an amino acid sequence of SEQ ID NOs:572, 573, and 574, respectively. In one embodiment, the first antigen binding domain that specifically binds CD8, comprises: (i) a VH comprising a VH CDR1, a VH CDR2, and a VH CDR3 having an amino acid sequence of a VH CDR1, a VH CDR2, and a VH CDR3, respectively, of a VH having an amino acid sequence of SEQ ID NO:575; and (ii) a VL comprising a VL CDR1, a VL CDR2, and a VL CDR3 having an amino acid sequence of a VL CDR1, a VL CDR2, and a VL CDR3, respectively, of a VL having an amino acid sequence of SEQ ID NO:576. In one embodiment, the first antigen binding domain that specifically binds CD8, comprises a VH having an amino acid sequence of SEQ ID NO:575. In one embodiment, the first antigen binding domain that specifically binds CD8, comprises a VL having an amino acid sequence of SEQ ID NO:576. In one embodiment, the first antigen binding domain that specifically binds CD8, comprises a VH having an amino acid sequence of SEQ ID NO:575, and a VL having an amino acid sequence of SEQ ID NO:576. In one embodiment, the first antigen binding domain that specifically binds CD8, comprises a heavy chain having an amino acid sequence of SEQ ID NO:577. In one embodiment, the first antigen binding domain that specifically binds CD8, comprises a light chain having an amino acid sequence of SEQ ID NO:578. In one embodiment, the first antigen binding domain that specifically binds CD8, comprises a heavy chain having an amino acid sequence of SEQ ID NO:577, and a light chain having an amino acid sequence of SEQ ID NO:578. In one embodiment, the first antigen binding domain that specifically binds CD8, comprises a VH having an amino acid sequence having at least 95% identity to an amino acid sequence of SEQ ID NO:575. In one embodiment, the first antigen binding domain that specifically binds CD8, comprises a VL having an amino acid sequence having at least 95% identity to an amino acid sequence of SEQ ID NO:576. In one embodiment, the first antigen binding domain that specifically binds CD8, comprises a VH having an amino acid sequence having at least 95% identity to an amino acid sequence of SEQ ID NO:575, and a VL having an amino acid sequence having at least 95% identity to an amino acid sequence of SEQ ID NO:576. In one embodiment, the first antigen binding domain that specifically binds CD8, comprises a heavy chain having an amino acid sequence having at least 95% identity to an amino acid sequence of SEQ ID NO:577. In one embodiment, the first antigen binding domain that specifically binds CD8, comprises a light chain having an amino acid sequence having at least 95% identity to an amino acid sequence of SEQ ID NO:578. In one embodiment, the first antigen binding domain that specifically binds CD8, comprises a heavy chain having an amino acid sequence having at least 95% identity to an amino acid sequence of SEQ ID NO:577, and a light chain having an amino acid sequence having at least 95% identity to an amino acid sequence of SEQ ID NO:578.

[0206] In one embodiment, the first antigen binding domain that specifically binds CD8, comprises: (i) a VH comprising a VH CDR1, a VH CDR2, and a VH CDR3 having an amino acid sequence of SEQ ID NOs:579, 580, and 581, respectively, and (ii) a VL comprising a VL CDR1, VL CDR2, and VL CDR3 having an amino acid sequence of SEQ ID NOs:582, 583, and 584, respectively. In one embodiment, the first antigen binding domain that specifically binds CD8, comprises: (i) a VH comprising a VH CDR1, a VH CDR2, and a VH CDR3 having an amino acid sequence of SEQ ID NOs:585, 586, and 587, respectively, and (ii) a VL comprising a VL CDR1, VL CDR2, and VL CDR3 having an amino acid sequence of SEQ ID NOs:588, 589, and 590, respectively. In one embodiment, the first antigen binding domain that specifically binds CD8, comprises: (i) a VH comprising a VH CDR1, a VH CDR2, and a VH CDR3 having an amino acid sequence of SEQ ID NOs:591, 592, and 593, respectively, and (ii) a VL comprising a VL CDR1, VL CDR2, and VL CDR3 having an amino acid sequence of SEQ ID NOs:594, 595, and 596, respectively. In one embodiment, the first antigen binding domain that specifically binds CD8, comprises: (i) a VH comprising a VH CDR1, a VH CDR2, and a VH CDR3 having an amino acid sequence of SEQ ID NOs:597, 598, and 599, respectively, and (ii) a VL comprising a VL CDR1, VL CDR2, and VL CDR3 having an amino acid sequence of SEQ ID NOs:600, 601, and 602, respectively. In one embodiment, the first antigen binding domain that specifically binds CD8, comprises: (i) a VH comprising a VH CDR1, a VH CDR2, and a VH CDR3 having an amino acid sequence of SEQ ID NOs:603, 604, and 605, respectively, and (ii) a VL comprising a VL CDR1, VL CDR2, and VL CDR3 having an amino acid sequence of SEQ ID NOs:606, 607, and 608, respectively. In one embodiment, the first antigen binding domain that specifically binds CD8, comprises: (i) a VH comprising a VH CDR1, a VH CDR2, and a VH CDR3 having an amino acid sequence of a VH CDR1, a VH CDR2, and a VH CDR3, respectively, of a VH having an amino acid sequence of SEQ ID NO:609; and (ii) a VL comprising a VL CDR1, a VL CDR2, and a VL CDR3 having an amino acid sequence of a VL CDR1, a VL CDR2, and a VL CDR3, respectively, of a VL having an amino acid sequence of SEQ ID NO:610. In one embodiment, the first antigen binding domain that specifically binds CD8, comprises a VH having an amino acid sequence of SEQ ID NO:609. In one embodiment, the first antigen binding domain that specifically binds CD8, comprises a VL having an amino acid sequence of SEQ ID NO:610. In one embodiment, the first antigen binding domain that specifically binds CD8, comprises a VH having an amino acid sequence of SEQ ID NO:609, and a VL having an amino acid sequence of SEQ ID NO:610. In one embodiment, the first antigen binding domain that specifically binds CD8, comprises a heavy chain having an amino acid sequence of SEQ ID NO:611. In one embodiment, the first antigen binding domain that specifically binds CD8, comprises a light chain having an amino acid sequence of SEQ ID NO:612. In one embodiment, the first antigen binding domain that specifically binds CD8, comprises a heavy chain having an amino acid sequence of SEQ ID NO:611, and a light chain having an amino acid sequence of SEQ ID NO:612. In one embodiment, the first antigen binding domain that specifically binds CD8, comprises a VH having an amino acid sequence having at least 95% identity to an amino acid sequence of SEQ ID NO:609. In one embodiment, the first antigen binding domain that specifically binds CD8, comprises a VL having an amino acid sequence having at least 95% identity to an amino acid sequence of SEQ ID NO:610. In one embodiment, the first antigen binding domain that specifically binds CD8, comprises a VH having an amino acid sequence having at least 95% identity to an amino acid sequence of SEQ ID NO:609, and a VL having an amino acid sequence having at least 95% identity to an amino acid sequence of SEQ ID NO:610. In one embodiment, the first antigen binding domain that specifically binds CD8, comprises a heavy chain having an amino acid sequence having at least 95% identity to an amino acid sequence of SEQ ID NO:611. In one embodiment, the first antigen binding domain that specifically binds CD8, comprises a light chain having an amino acid sequence having at least 95% identity to an amino acid sequence of SEQ ID NO:612. In one embodiment, the first antigen binding domain that specifically binds CD8, comprises a heavy chain having an amino acid sequence having at least 95% identity to an amino acid sequence of SEQ ID NO:611, and a light chain having an amino acid sequence having at least 95% identity to an amino acid sequence of SEQ ID NO:612.

[0207] In one embodiment, the first antigen binding domain that specifically binds CD8, comprises: (i) a VH comprising a VH CDR1, a VH CDR2, and a VH CDR3 having an amino acid sequence of SEQ ID NOs:613, 614, and 615, respectively, and (ii) a VL comprising a VL CDR1, VL CDR2, and VL CDR3 having an amino acid sequence of SEQ ID NOs:616, 617, and 618, respectively. In one embodiment, the first antigen binding domain that specifically binds CD8, comprises: (i) a VH comprising a VH CDR1, a VH CDR2, and a VH CDR3 having an amino acid sequence of SEQ ID NOs:619, 620, and 621, respectively, and (ii) a VL comprising a VL CDR1, VL CDR2, and VL CDR3 having an amino acid sequence of SEQ ID NOs:622, 523, and 624, respectively. In one embodiment, the first antigen binding domain that specifically binds CD8, comprises: (i) a VH comprising a VH CDR1, a VH CDR2, and a VH CDR3 having an amino acid sequence of SEQ ID NOs:625, 626, and 627, respectively, and (ii) a VL comprising a VL CDR1, VL CDR2, and VL CDR3 having an amino acid sequence of SEQ ID NOs:628, 629, and 630, respectively. In one embodiment, the first antigen binding domain that specifically binds CD8, comprises: (i) a VH comprising a VH CDR1, a VH CDR2, and a VH CDR3 having an amino acid sequence of SEQ ID NOs:631, 632, and 633, respectively, and (ii) a VL comprising a VL CDR1, VL CDR2, and VL CDR3 having an amino acid sequence of SEQ ID NOs:634, 635, and 636, respectively. In one embodiment, the first antigen binding domain that specifically binds CD8, comprises: (i) a VH comprising a VH CDR1, a VH CDR2, and a VH CDR3 having an amino acid sequence of SEQ ID NOs:637, 638, and 639, respectively, and (ii) a VL comprising a VL CDR1, VL CDR2, and VL CDR3 having an amino acid sequence of SEQ ID NOs:640, 641, and 642, respectively. In one embodiment, the first antigen binding domain that specifically binds CD8, comprises: (i) a VH comprising a VH CDR1, a VH CDR2, and a VH CDR3 having an amino acid sequence of a VH CDR1, a VH CDR2, and a VH CDR3, respectively, of a VH having an amino acid sequence of SEQ ID NO:643; and (ii) a VL comprising a VL CDR1, a VL CDR2, and a VL CDR3 having an amino acid sequence of a VL CDR1, a VL CDR2, and a VL CDR3, respectively, of a VL having an amino acid sequence of SEQ ID NO:644. In one embodiment, the first antigen binding domain that specifically binds CD8, comprises a VH having an amino acid sequence of SEQ ID NO:643. In one embodiment, the first antigen binding domain that specifically binds CD8, comprises a VL having an amino acid sequence of SEQ ID NO:644. In one embodiment, the first antigen binding domain that specifically binds CD8, comprises a VH having an amino acid sequence of SEQ ID NO:643, and a VL having an amino acid sequence of SEQ ID NO:644. In one embodiment, the first antigen binding domain that specifically binds CD8, comprises a heavy chain having an amino acid sequence of SEQ ID NO:645. In one embodiment, the first antigen binding domain that specifically binds CD8, comprises a light chain having an amino acid sequence of SEQ ID NO:646. In one embodiment, the first antigen binding domain that specifically binds CD8, comprises a heavy chain having an amino acid sequence of SEQ ID NO:645, and a light chain having an amino acid sequence of SEQ ID NO:646. In one embodiment, the first antigen binding domain that specifically binds CD8, comprises a VH having an amino acid sequence having at least 95% identity to an amino acid sequence of SEQ ID NO:643. In one embodiment, the first antigen binding domain that specifically binds CD8, comprises a VL having an amino acid sequence having at least 95% identity to an amino acid sequence of SEQ ID NO:644. In one embodiment, the first antigen binding domain that specifically binds CD8, comprises a VH having an amino acid sequence having at least 95% identity to an amino acid sequence of SEQ ID NO:643, and a VL having an amino acid sequence having at least 95% identity to an amino acid sequence of SEQ ID NO:644. In one embodiment, the first antigen binding domain that specifically binds CD8, comprises a heavy chain having an amino acid sequence having at least 95% identity to an amino acid sequence of SEQ ID NO:645. In one embodiment, the first antigen binding domain that specifically binds CD8, comprises a light chain having an amino acid sequence having at least 95% identity to an amino acid sequence of SEQ ID NO:646. In one embodiment, the first antigen binding domain that specifically binds CD8, comprises a heavy chain having an amino acid sequence having at least 95% identity to an amino acid sequence of SEQ ID NO:645, and a light chain having an amino acid sequence having at least 95% identity to an amino acid sequence of SEQ ID NO:646.

[0208] In one embodiment, the first antigen binding domain that specifically binds CD8, comprises: (i) a VH comprising a VH CDR1, a VH CDR2, and a VH CDR3 having an amino acid sequence of SEQ ID NOs:647, 648, and 649, respectively, and (ii) a VL comprising a VL CDR1, VL CDR2, and VL CDR3 having an amino acid sequence of SEQ ID NOs:650, 651, and 652, respectively. In one embodiment, the first antigen binding domain that specifically binds CD8, comprises: (i) a VH comprising a VH CDR1, a VH CDR2, and a VH CDR3 having an amino acid sequence of SEQ ID NOs:653, 654, and 655, respectively, and (ii) a VL comprising a VL CDR1, VL CDR2, and VL CDR3 having an amino acid sequence of SEQ ID NOs:656, 657, and 658, respectively. In one embodiment, the first antigen binding domain that specifically binds CD8, comprises: (i) a VH comprising a VH CDR1, a VH CDR2, and a VH CDR3 having an amino acid sequence of SEQ ID NOs:659, 660, and 661, respectively, and (ii) a VL comprising a VL CDR1, VL CDR2, and VL CDR3 having an amino acid sequence of SEQ ID NOs:662, 663, and 664, respectively. In one embodiment, the first antigen binding domain that specifically binds CD8, comprises: (i) a VH comprising a VH CDR1, a VH CDR2, and a VH CDR3 having an amino acid sequence of SEQ ID NOs:665, 666, and 667, respectively, and (ii) a VL comprising a VL CDR1, VL CDR2, and VL CDR3 having an amino acid sequence of SEQ ID NOs:668, 669, and 670, respectively. In one embodiment, the first antigen binding domain that specifically binds CD8, comprises: (i) a VH comprising a VH CDR1, a VH CDR2, and a VH CDR3 having an amino acid sequence of SEQ ID NOs:671, 672, and 673, respectively, and (ii) a VL comprising a VL CDR1, VL CDR2, and VL CDR3 having an amino acid sequence of SEQ ID NOs:674, 675, and 676, respectively. In one embodiment, the first antigen binding domain that specifically binds CD8, comprises: (i) a VH comprising a VH CDR1, a VH CDR2, and a VH CDR3 having an amino acid sequence of a VH CDR1, a VH CDR2, and a VH CDR3, respectively, of a VH having an amino acid sequence of SEQ ID NO:677; and (ii) a VL comprising a VL CDR1, a VL CDR2, and a VL CDR3 having an amino acid sequence of a VL CDR1, a VL CDR2, and a VL CDR3, respectively, of a VL having an amino acid sequence of SEQ ID NO:678. In one embodiment, the first antigen binding domain that specifically binds CD8, comprises a VH having an amino acid sequence of SEQ ID NO:677. In one embodiment, the first antigen binding domain that specifically binds CD8, comprises a VL having an amino acid sequence of SEQ ID NO:678. In one embodiment, the first antigen binding domain that specifically binds CD8, comprises a VH having an amino acid sequence of SEQ ID NO:677, and a VL having an amino acid sequence of SEQ ID NO:678. In one embodiment, the first antigen binding domain that specifically binds CD8, comprises a heavy chain having an amino acid sequence of SEQ ID NO:679. In one embodiment, the first antigen binding domain that specifically binds CD8, comprises a light chain having an amino acid sequence of SEQ ID NO:680. In one embodiment, the first antigen binding domain that specifically binds CD8, comprises a heavy chain having an amino acid sequence of SEQ ID NO:679, and a light chain having an amino acid sequence of SEQ ID NO:680. In one embodiment, the first antigen binding domain that specifically binds CD8, comprises a VH having an amino acid sequence having at least 95% identity to an amino acid sequence of SEQ ID NO:677. In one embodiment, the first antigen binding domain that specifically binds CD8, comprises a VL having an amino acid sequence having at least 95% identity to an amino acid sequence of SEQ ID NO:678. In one embodiment, the first antigen binding domain that specifically binds CD8, comprises a VH having an amino acid sequence having at least 95% identity to an amino acid sequence of SEQ ID NO:677, and a VL having an amino acid sequence having at least 95% identity to an amino acid sequence of SEQ ID NO:678. In one embodiment, the first antigen binding domain that specifically binds CD8, comprises a heavy chain having an amino acid sequence having at least 95% identity to an amino acid sequence of SEQ ID NO:679. In one embodiment, the first antigen binding domain that specifically binds CD8, comprises a light chain having an amino acid sequence having at least 95% identity to an amino acid sequence of SEQ ID NO:680. In one embodiment, the first antigen binding domain that specifically binds CD8, comprises a heavy chain having an amino acid sequence having at least 95% identity to an amino acid sequence of SEQ ID NO:679, and a light chain having an amino acid sequence having at least 95% identity to an amino acid sequence of SEQ ID NO:680.

[0209] In one embodiment, the first antigen binding domain that specifically binds CD8, comprises: (i) a VH comprising a VH CDR1, a VH CDR2, and a VH CDR3 having an amino acid sequence of SEQ ID NOs:681, 682, and 683, respectively, and (ii) a VL comprising a VL CDR1, VL CDR2, and VL CDR3 having an amino acid sequence of SEQ ID NOs:684, 685, and 686, respectively. In one embodiment, the first antigen binding domain that specifically binds CD8, comprises: (i) a VH comprising a VH CDR1, a VH CDR2, and a VH CDR3 having an amino acid sequence of SEQ ID NOs:687, 688, and 689, respectively, and (ii) a VL comprising a VL CDR1, VL CDR2, and VL CDR3 having an amino acid sequence of SEQ ID NOs:690, 691, and 692, respectively. In one embodiment, the first antigen binding domain that specifically binds CD8, comprises: (i) a VH comprising a VH CDR1, a VH CDR2, and a VH CDR3 having an amino acid sequence of SEQ ID NOs:693, 694, and 695, respectively, and (ii) a VL comprising a VL CDR1, VL CDR2, and VL CDR3 having an amino acid sequence of SEQ ID NOs:696, 697, and 698, respectively. In one embodiment, the first antigen binding domain that specifically binds CD8, comprises: (i) a VH comprising a VH CDR1, a VH CDR2, and a VH CDR3 having an amino acid sequence of SEQ ID NOs:699, 700, and 701, respectively, and (ii) a VL comprising a VL CDR1, VL CDR2, and VL CDR3 having an amino acid sequence of SEQ ID NOs:702, 703, and 704, respectively. In one embodiment, the first antigen binding domain that specifically binds CD8, comprises: (i) a VH comprising a VH CDR1, a VH CDR2, and a VH CDR3 having an amino acid sequence of SEQ ID NOs:705, 706, and 707, respectively, and (ii) a VL comprising a VL CDR1, VL CDR2, and VL CDR3 having an amino acid sequence of SEQ ID NOs:708, 709, and 710, respectively. In one embodiment, the first antigen binding domain that specifically binds CD8, comprises: (i) a VH comprising a VH CDR1, a VH CDR2, and a VH CDR3 having an amino acid sequence of a VH CDR1, a VH CDR2, and a VH CDR3, respectively, of a VH having an amino acid sequence of SEQ ID NO:711; and (ii) a VL comprising a VL CDR1, a VL CDR2, and a VL CDR3 having an amino acid sequence of a VL CDR1, a VL CDR2, and a VL CDR3, respectively, of a VL having an amino acid sequence of SEQ ID NO:712. In one embodiment, the first antigen binding domain that specifically binds CD8, comprises a VH having an amino acid sequence of SEQ ID NO:711. In one embodiment, the first antigen binding domain that specifically binds CD8, comprises a VL having an amino acid sequence of SEQ ID NO:712. In one embodiment, the first antigen binding domain that specifically binds CD8, comprises a VH having an amino acid sequence of SEQ ID NO:711, and a VL having an amino acid sequence of SEQ ID NO:712. In one embodiment, the first antigen binding domain that specifically binds CD8, comprises a heavy chain having an amino acid sequence of SEQ ID NO:713. In one embodiment, the first antigen binding domain that specifically binds CD8, comprises a light chain having an amino acid sequence of SEQ ID NO:714. In one embodiment, the first antigen binding domain that specifically binds CD8, comprises a heavy chain having an amino acid sequence of SEQ ID NO:713, and a light chain having an amino acid sequence of SEQ ID NO:714. In one embodiment, the first antigen binding domain that specifically binds CD8, comprises a VH having an amino acid sequence having at least 95% identity to an amino acid sequence of SEQ ID NO:711. In one embodiment, the first antigen binding domain that specifically binds CD8, comprises a VL having an amino acid sequence having at least 95% identity to an amino acid sequence of SEQ ID NO:712. In one embodiment, the first antigen binding domain that specifically binds CD8, comprises a VH having an amino acid sequence having at least 95% identity to an amino acid sequence of SEQ ID NO:711, and a VL having an amino acid sequence having at least 95% identity to an amino acid sequence of SEQ ID NO:712. In one embodiment, the first antigen binding domain that specifically binds CD8, comprises a heavy chain having an amino acid sequence having at least 95% identity to an amino acid sequence of SEQ ID NO:713. In one embodiment, the first antigen binding domain that specifically binds CD8, comprises a light chain having an amino acid sequence having at least 95% identity to an amino acid sequence of SEQ ID NO:714. In one embodiment, the first antigen binding domain that specifically binds CD8, comprises a heavy chain having an amino acid sequence having at least 95% identity to an amino acid sequence of SEQ ID NO:713, and a light chain having an amino acid sequence having at least 95% identity to an amino acid sequence of SEQ ID NO:714.

[0210] In one embodiment, the first antigen binding domain that specifically binds CD8, comprises: (i) a VH comprising a VH CDR1, a VH CDR2, and a VH CDR3 having an amino acid sequence of SEQ ID NOs:715, 716, and 717, respectively, and (ii) a VL comprising a VL CDR1, VL CDR2, and VL CDR3 having an amino acid sequence of SEQ ID NOs:718, 719, and 720, respectively. In one embodiment, the first antigen binding domain that specifically binds CD8, comprises: (i) a VH comprising a VH CDR1, a VH CDR2, and a VH CDR3 having an amino acid sequence of SEQ ID NOs:721, 722, and 723, respectively, and (ii) a VL comprising a VL CDR1, VL CDR2, and VL CDR3 having an amino acid sequence of SEQ ID NOs:724, 725, and 726, respectively. In one embodiment, the first antigen binding domain that specifically binds CD8, comprises: (i) a VH comprising a VH CDR1, a VH CDR2, and a VH CDR3 having an amino acid sequence of SEQ ID NOs:727, 728, and 729, respectively, and (ii) a VL comprising a VL CDR1, VL CDR2, and VL CDR3 having an amino acid sequence of SEQ ID NOs:730, 731, and 732, respectively. In one embodiment, the first antigen binding domain that specifically binds CD8, comprises: (i) a VH comprising a VH CDR1, a VH CDR2, and a VH CDR3 having an amino acid sequence of SEQ ID NOs:733, 734, and 735, respectively, and (ii) a VL comprising a VL CDR1, VL CDR2, and VL CDR3 having an amino acid sequence of SEQ ID NOs:736, 737, and 738, respectively. In one embodiment, the first antigen binding domain that specifically binds CD8, comprises: (i) a VH comprising a VH CDR1, a VH CDR2, and a VH CDR3 having an amino acid sequence of SEQ ID NOs:739, 740, and 741, respectively, and (ii) a VL comprising a VL CDR1, VL CDR2, and VL CDR3 having an amino acid sequence of SEQ ID NOs:742, 743, and 744, respectively. In one embodiment, the first antigen binding domain that specifically binds CD8, comprises: (i) a VH comprising a VH CDR1, a VH CDR2, and a VH CDR3 having an amino acid sequence of a VH CDR1, a VH CDR2, and a VH CDR3, respectively, of a VH having an amino acid sequence of SEQ ID NO:745; and (ii) a VL comprising a VL CDR1, a VL CDR2, and a VL CDR3 having an amino acid sequence of a VL CDR1, a VL CDR2, and a VL CDR3, respectively, of a VL having an amino acid sequence of SEQ ID NO:746. In one embodiment, the first antigen binding domain that specifically binds CD8, comprises a VH having an amino acid sequence of SEQ ID NO:745. In one embodiment, the first antigen binding domain that specifically binds CD8, comprises a VL having an amino acid sequence of SEQ ID NO:746. In one embodiment, the first antigen binding domain that specifically binds CD8, comprises a VH having an amino acid sequence of SEQ ID NO:745, and a VL having an amino acid sequence of SEQ ID NO:746. In one embodiment, the first antigen binding domain that specifically binds CD8, comprises a heavy chain having an amino acid sequence of SEQ ID NO:747. In one embodiment, the first antigen binding domain that specifically binds CD8, comprises a light chain having an amino acid sequence of SEQ ID NO:748. In one embodiment, the first antigen binding domain that specifically binds CD8, comprises a heavy chain having an amino acid sequence of SEQ ID NO:747, and a light chain having an amino acid sequence of SEQ ID NO:748. In one embodiment, the first antigen binding domain that specifically binds CD8, comprises a VH having an amino acid sequence having at least 95% identity to an amino acid sequence of SEQ ID NO:745. In one embodiment, the first antigen binding domain that specifically binds CD8, comprises a VL having an amino acid sequence having at least 95% identity to an amino acid sequence of SEQ ID NO:746. In one embodiment, the first antigen binding domain that specifically binds CD8, comprises a VH having an amino acid sequence having at least 95% identity to an amino acid sequence of SEQ ID NO:745, and a VL having an amino acid sequence having at least 95% identity to an amino acid sequence of SEQ ID NO:746. In one embodiment, the first antigen binding domain that specifically binds CD8, comprises a heavy chain having an amino acid sequence having at least 95% identity to an amino acid sequence of SEQ ID NO:747. In one embodiment, the first antigen binding domain that specifically binds CD8, comprises a light chain having an amino acid sequence having at least 95% identity to an amino acid sequence of SEQ ID NO:748. In one embodiment, the first antigen binding domain that specifically binds CD8, comprises a heavy chain having an amino acid sequence having at least 95% identity to an amino acid sequence of SEQ ID NO:747, and a light chain having an amino acid sequence having at least 95% identity to an amino acid sequence of SEQ ID NO:748.

[0211] In one embodiment, the first antigen binding domain that specifically binds CD8, comprises: (i) a VH comprising a VH CDR1, a VH CDR2, and a VH CDR3 having an amino acid sequence of SEQ ID NOs:749, 750, and 751, respectively, and (ii) a VL comprising a VL CDR1, VL CDR2, and VL CDR3 having an amino acid sequence of SEQ ID NOs:752, 753, and 754, respectively. In one embodiment, the first antigen binding domain that specifically binds CD8, comprises: (i) a VH comprising a VH CDR1, a VH CDR2, and a VH CDR3 having an amino acid sequence of SEQ ID NOs:755, 756, and 757, respectively, and (ii) a VL comprising a VL CDR1, VL CDR2, and VL CDR3 having an amino acid sequence of SEQ ID NOs:758, 759, and 760, respectively. In one embodiment, the first antigen binding domain that specifically binds CD8, comprises: (i) a VH comprising a VH CDR1, a VH CDR2, and a VH CDR3 having an amino acid sequence of SEQ ID NOs:761, 762, and 763, respectively, and (ii) a VL comprising a VL CDR1, VL CDR2, and VL CDR3 having an amino acid sequence of SEQ ID NOs:764, 765, and 766, respectively. In one embodiment, the first antigen binding domain that specifically binds CD8, comprises: (i) a VH comprising a VH CDR1, a VH CDR2, and a VH CDR3 having an amino acid sequence of SEQ ID NOs:767, 768, and 769, respectively, and (ii) a VL comprising a VL CDR1, VL CDR2, and VL CDR3 having an amino acid sequence of SEQ ID NOs:770, 771, and 772, respectively. In one embodiment, the first antigen binding domain that specifically binds CD8, comprises: (i) a VH comprising a VH CDR1, a VH CDR2, and a VH CDR3 having an amino acid sequence of SEQ ID NOs:773, 774, and 775, respectively, and (ii) a VL comprising a VL CDR1, VL CDR2, and VL CDR3 having an amino acid sequence of SEQ ID NOs:776, 777, and 778, respectively. In one embodiment, the first antigen binding domain that specifically binds CD8, comprises: (i) a VH comprising a VH CDR1, a VH CDR2, and a VH CDR3 having an amino acid sequence of a VH CDR1, a VH CDR2, and a VH CDR3, respectively, of a VH having an amino acid sequence of SEQ ID NO:779; and (ii) a VL comprising a VL CDR1, a VL CDR2, and a VL CDR3 having an amino acid sequence of a VL CDR1, a VL CDR2, and a VL CDR3, respectively, of a VL having an amino acid sequence of SEQ ID NO:780. In one embodiment, the first antigen binding domain that specifically binds CD8, comprises a VH having an amino acid sequence of SEQ ID NO:779. In one embodiment, the first antigen binding domain that specifically binds CD8, comprises a VL having an amino acid sequence of SEQ ID NO:780. In one embodiment, the first antigen binding domain that specifically binds CD8, comprises a VH having an amino acid sequence of SEQ ID NO:779, and a VL having an amino acid sequence of SEQ ID NO:780. In one embodiment, the first antigen binding domain that specifically binds CD8, comprises a heavy chain having an amino acid sequence of SEQ ID NO:781. In one embodiment, the first antigen binding domain that specifically binds CD8, comprises a light chain having an amino acid sequence of SEQ ID NO:782. In one embodiment, the first antigen binding domain that specifically binds CD8, comprises a heavy chain having an amino acid sequence of SEQ ID NO:781, and a light chain having an amino acid sequence of SEQ ID NO:782. In one embodiment, the first antigen binding domain that specifically binds CD8, comprises a VH having an amino acid sequence having at least 95% identity to an amino acid sequence of SEQ ID NO:779. In one embodiment, the first antigen binding domain that specifically binds CD8, comprises a VL having an amino acid sequence having at least 95% identity to an amino acid sequence of SEQ ID NO:780. In one embodiment, the first antigen binding domain that specifically binds CD8, comprises a VH having an amino acid sequence having at least 95% identity to an amino acid sequence of SEQ ID NO:779, and a VL having an amino acid sequence having at least 95% identity to an amino acid sequence of SEQ ID NO:780. In one embodiment, the first antigen binding domain that specifically binds CD8, comprises a heavy chain having an amino acid sequence having at least 95% identity to an amino acid sequence of SEQ ID NO:781. In one embodiment, the first antigen binding domain that specifically binds CD8, comprises a light chain having an amino acid sequence having at least 95% identity to an amino acid sequence of SEQ ID NO:782. In one embodiment, the first antigen binding domain that specifically binds CD8, comprises a heavy chain having an amino acid sequence having at least 95% identity to an amino acid sequence of SEQ ID NO:781, and a light chain having an amino acid sequence having at least 95% identity to an amino acid sequence of SEQ ID NO:782.

[0212] In one embodiment, the first antigen binding domain that specifically binds CD8, comprises: (i) a VH comprising a VH CDR1, a VH CDR2, and a VH CDR3 having an amino acid sequence of SEQ ID NOs:783, 784, and 785, respectively, and (ii) a VL comprising a VL CDR1, VL CDR2, and VL CDR3 having an amino acid sequence of SEQ ID NOs:786, 787, and 788, respectively. In one embodiment, the first antigen binding domain that specifically binds CD8, comprises: (i) a VH comprising a VH CDR1, a VH CDR2, and a VH CDR3 having an amino acid sequence of SEQ ID NOs:789, 790, and 791, respectively, and (ii) a VL comprising a VL CDR1, VL CDR2, and VL CDR3 having an amino acid sequence of SEQ ID NOs:792, 793, and 794, respectively. In one embodiment, the first antigen binding domain that specifically binds CD8, comprises: (i) a VH comprising a VH CDR1, a VH CDR2, and a VH CDR3 having an amino acid sequence of SEQ ID NOs:795, 796, and 797, respectively, and (ii) a VL comprising a VL CDR1, VL CDR2, and VL CDR3 having an amino acid sequence of SEQ ID NOs:798, 799, and 800, respectively. In one embodiment, the first antigen binding domain that specifically binds CD8, comprises: (i) a VH comprising a VH CDR1, a VH CDR2, and a VH CDR3 having an amino acid sequence of SEQ ID NOs:801, 802, and 803, respectively, and (ii) a VL comprising a VL CDR1, VL CDR2, and VL CDR3 having an amino acid sequence of SEQ ID NOs:804, 805, and 806, respectively. In one embodiment, the first antigen binding domain that specifically binds CD8, comprises: (i) a VH comprising a VH CDR1, a VH CDR2, and a VH CDR3 having an amino acid sequence of SEQ ID NOs:807, 808, and 809, respectively, and (ii) a VL comprising a VL CDR1, VL CDR2, and VL CDR3 having an amino acid sequence of SEQ ID NOs:810, 811, and 812, respectively. In one embodiment, the first antigen binding domain that specifically binds CD8, comprises: (i) a VH comprising a VH CDR1, a VH CDR2, and a VH CDR3 having an amino acid sequence of a VH CDR1, a VH CDR2, and a VH CDR3, respectively, of a VH having an amino acid sequence of SEQ ID NO:813; and (ii) a VL comprising a VL CDR1, a VL CDR2, and a VL CDR3 having an amino acid sequence of a VL CDR1, a VL CDR2, and a VL CDR3, respectively, of a VL having an amino acid sequence of SEQ ID NO:814. In one embodiment, the first antigen binding domain that specifically binds CD8, comprises a VH having an amino acid sequence of SEQ ID NO:813. In one embodiment, the first antigen binding domain that specifically binds CD8, comprises a VL having an amino acid sequence of SEQ ID NO:814. In one embodiment, the first antigen binding domain that specifically binds CD8, comprises a VH having an amino acid sequence of SEQ ID NO:813, and a VL having an amino acid sequence of SEQ ID NO:814. In one embodiment, the first antigen binding domain that specifically binds CD8, comprises a heavy chain having an amino acid sequence of SEQ ID NO:815. In one embodiment, the first antigen binding domain that specifically binds CD8, comprises a light chain having an amino acid sequence of SEQ ID NO:816. In one embodiment, the first antigen binding domain that specifically binds CD8, comprises a heavy chain having an amino acid sequence of SEQ ID NO:815, and a light chain having an amino acid sequence of SEQ ID NO:816. In one embodiment, the first antigen binding domain that specifically binds CD8, comprises a VH having an amino acid sequence having at least 95% identity to an amino acid sequence of SEQ ID NO:813. In one embodiment, the first antigen binding domain that specifically binds CD8, comprises a VL having an amino acid sequence having at least 95% identity to an amino acid sequence of SEQ ID NO:814. In one embodiment, the first antigen binding domain that specifically binds CD8, comprises a VH having an amino acid sequence having at least 95% identity to an amino acid sequence of SEQ ID NO:813, and a VL having an amino acid sequence having at least 95% identity to an amino acid sequence of SEQ ID NO:814. In one embodiment, the first antigen binding domain that specifically binds CD8, comprises a heavy chain having an amino acid sequence having at least 95% identity to an amino acid sequence of SEQ ID NO:815. In one embodiment, the first antigen binding domain that specifically binds CD8, comprises a light chain having an amino acid sequence having at least 95% identity to an amino acid sequence of SEQ ID NO:816. In one embodiment, the first antigen binding domain that specifically binds CD8, comprises a heavy chain having an amino acid sequence having at least 95% identity to an amino acid sequence of SEQ ID NO:815, and a light chain having an amino acid sequence having at least 95% identity to an amino acid sequence of SEQ ID NO:816.

[0213] In one embodiment, the first antigen binding domain that specifically binds CD8, comprises: (i) a VH comprising a VH CDR1, a VH CDR2, and a VH CDR3 having an amino acid sequence of SEQ ID NOs:817, 818, and 819, respectively, and (ii) a VL comprising a VL CDR1, VL CDR2, and VL CDR3 having an amino acid sequence of SEQ ID NOs:820, 821, and 822, respectively. In one embodiment, the first antigen binding domain that specifically binds CD8, comprises: (i) a VH comprising a VH CDR1, a VH CDR2, and a VH CDR3 having an amino acid sequence of SEQ ID NOs:823, 824, and 825, respectively, and (ii) a VL comprising a VL CDR1, VL CDR2, and VL CDR3 having an amino acid sequence of SEQ ID NOs:826, 827, and 828, respectively. In one embodiment, the first antigen binding domain that specifically binds CD8, comprises: (i) a VH comprising a VH CDR1, a VH CDR2, and a VH CDR3 having an amino acid sequence of SEQ ID NOs:829, 830, and 831, respectively, and (ii) a VL comprising a VL CDR1, VL CDR2, and VL CDR3 having an amino acid sequence of SEQ ID NOs:832, 833, and 834, respectively. In one embodiment, the first antigen binding domain that specifically binds CD8, comprises: (i) a VH comprising a VH CDR1, a VH CDR2, and a VH CDR3 having an amino acid sequence of SEQ ID NOs:835, 836, and 837, respectively, and (ii) a VL comprising a VL CDR1, VL CDR2, and VL CDR3 having an amino acid sequence of SEQ ID NOs:838, 839, and 840, respectively. In one embodiment, the first antigen binding domain that specifically binds CD8, comprises: (i) a VH comprising a VH CDR1, a VH CDR2, and a VH CDR3 having an amino acid sequence of SEQ ID NOs:841, 842, and 843, respectively, and (ii) a VL comprising a VL CDR1, VL CDR2, and VL CDR3 having an amino acid sequence of SEQ ID NOs:844, 845, and 846, respectively. In one embodiment, the first antigen binding domain that specifically binds CD8, comprises: (i) a VH comprising a VH CDR1, a VH CDR2, and a VH CDR3 having an amino acid sequence of a VH CDR1, a VH CDR2, and a VH CDR3, respectively, of a VH having an amino acid sequence of SEQ ID NO:847; and (ii) a VL comprising a VL CDR1, a VL CDR2, and a VL CDR3 having an amino acid sequence of a VL CDR1, a VL CDR2, and a VL CDR3, respectively, of a VL having an amino acid sequence of SEQ ID NO:848. In one embodiment, the first antigen binding domain that specifically binds CD8, comprises a VH having an amino acid sequence of SEQ ID NO:847. In one embodiment, the first antigen binding domain that specifically binds CD8, comprises a VL having an amino acid sequence of SEQ ID NO:848. In one embodiment, the first antigen binding domain that specifically binds CD8, comprises a VH having an amino acid sequence of SEQ ID NO:847, and a VL having an amino acid sequence of SEQ ID NO:848. In one embodiment, the first antigen binding domain that specifically binds CD8, comprises a heavy chain having an amino acid sequence of SEQ ID NO:849. In one embodiment, the first antigen binding domain that specifically binds CD8, comprises a light chain having an amino acid sequence of SEQ ID NO:850. In one embodiment, the first antigen binding domain that specifically binds CD8, comprises a heavy chain having an amino acid sequence of SEQ ID NO:849, and a light chain having an amino acid sequence of SEQ ID NO:850. In one embodiment, the first antigen binding domain that specifically binds CD8, comprises a VH having an amino acid sequence having at least 95% identity to an amino acid sequence of SEQ ID NO:847. In one embodiment, the first antigen binding domain that specifically binds CD8, comprises a VL having an amino acid sequence having at least 95% identity to an amino acid sequence of SEQ ID NO:848. In one embodiment, the first antigen binding domain that specifically binds CD8, comprises a VH having an amino acid sequence having at least 95% identity to an amino acid sequence of SEQ ID NO:847, and a VL having an amino acid sequence having at least 95% identity to an amino acid sequence of SEQ ID NO:848. In one embodiment, the first antigen binding domain that specifically binds CD8, comprises a heavy chain having an amino acid sequence having at least 95% identity to an amino acid sequence of SEQ ID NO:849. In one embodiment, the first antigen binding domain that specifically binds CD8, comprises a light chain having an amino acid sequence having at least 95% identity to an amino acid sequence of SEQ ID NO:850. In one embodiment, the first antigen binding domain that specifically binds CD8, comprises a heavy chain having an amino acid sequence having at least 95% identity to an amino acid sequence of SEQ ID NO:849, and a light chain having an amino acid sequence having at least 95% identity to an amino acid sequence of SEQ ID NO:850.

[0214] In one embodiment, the first antigen binding domain that specifically binds CD8, comprises: (i) a VH comprising a VH CDR1, a VH CDR2, and a VH CDR3 having an amino acid sequence of SEQ ID NOs:851, 852, and 853, respectively, and (ii) a VL comprising a VL CDR1, VL CDR2, and VL CDR3 having an amino acid sequence of SEQ ID NOs:854, 855, and 856, respectively. In one embodiment, the first antigen binding domain that specifically binds CD8, comprises: (i) a VH comprising a VH CDR1, a VH CDR2, and a VH CDR3 having an amino acid sequence of SEQ ID NOs:857, 858, and 859, respectively, and (ii) a VL comprising a VL CDR1, VL CDR2, and VL CDR3 having an amino acid sequence of SEQ ID NOs:860, 861, and 862, respectively. In one embodiment, the first antigen binding domain that specifically binds CD8, comprises: (i) a VH comprising a VH CDR1, a VH CDR2, and a VH CDR3 having an amino acid sequence of SEQ ID NOs:863, 864, and 865, respectively, and (ii) a VL comprising a VL CDR1, VL CDR2, and VL CDR3 having an amino acid sequence of SEQ ID NOs:866, 867, and 868, respectively. In one embodiment, the first antigen binding domain that specifically binds CD8, comprises: (i) a VH comprising a VH CDR1, a VH CDR2, and a VH CDR3 having an amino acid sequence of SEQ ID NOs:869, 870, and 871, respectively, and (ii) a VL comprising a VL CDR1, VL CDR2, and VL CDR3 having an amino acid sequence of SEQ ID NOs:872, 873, and 874, respectively. In one embodiment, the first antigen binding domain that specifically binds CD8, comprises: (i) a VH comprising a VH CDR1, a VH CDR2, and a VH CDR3 having an amino acid sequence of SEQ ID NOs:875, 876, and 877, respectively, and (ii) a VL comprising a VL CDR1, VL CDR2, and VL CDR3 having an amino acid sequence of SEQ ID NOs:878, 879, and 880, respectively. In one embodiment, the first antigen binding domain that specifically binds CD8, comprises: (i) a VH comprising a VH CDR1, a VH CDR2, and a VH CDR3 having an amino acid sequence of a VH CDR1, a VH CDR2, and a VH CDR3, respectively, of a VH having an amino acid sequence of SEQ ID NO:881; and (ii) a VL comprising a VL CDR1, a VL CDR2, and a VL CDR3 having an amino acid sequence of a VL CDR1, a VL CDR2, and a VL CDR3, respectively, of a VL having an amino acid sequence of SEQ ID NO:882. In one embodiment, the first antigen binding domain that specifically binds CD8, comprises a VH having an amino acid sequence of SEQ ID NO:881. In one embodiment, the first antigen binding domain that specifically binds CD8, comprises a VL having an amino acid sequence of SEQ ID NO:882. In one embodiment, the first antigen binding domain that specifically binds CD8, comprises a VH having an amino acid sequence of SEQ ID NO:881, and a VL having an amino acid sequence of SEQ ID NO:882. In one embodiment, the first antigen binding domain that specifically binds CD8, comprises a heavy chain having an amino acid sequence of SEQ ID NO:883. In one embodiment, the first antigen binding domain that specifically binds CD8, comprises a light chain having an amino acid sequence of SEQ ID NO:884. In one embodiment, the first antigen binding domain that specifically binds CD8, comprises a heavy chain having an amino acid sequence of SEQ ID NO:883, and a light chain having an amino acid sequence of SEQ ID NO:884. In one embodiment, the first antigen binding domain that specifically binds CD8, comprises a VH having an amino acid sequence having at least 95% identity to an amino acid sequence of SEQ ID NO:881. In one embodiment, the first antigen binding domain that specifically binds CD8, comprises a VL having an amino acid sequence having at least 95% identity to an amino acid sequence of SEQ ID NO:882. In one embodiment, the first antigen binding domain that specifically binds CD8, comprises a VH having an amino acid sequence having at least 95% identity to an amino acid sequence of SEQ ID NO:881, and a VL having an amino acid sequence having at least 95% identity to an amino acid sequence of SEQ ID NO:882. In one embodiment, the first antigen binding domain that specifically binds CD8, comprises a heavy chain having an amino acid sequence having at least 95% identity to an amino acid sequence of SEQ ID NO:883. In one embodiment, the first antigen binding domain that specifically binds CD8, comprises a light chain having an amino acid sequence having at least 95% identity to an amino acid sequence of SEQ ID NO:884. In one embodiment, the first antigen binding domain that specifically binds CD8, comprises a heavy chain having an amino acid sequence having at least 95% identity to an amino acid sequence of SEQ ID NO:883, and a light chain having an amino acid sequence having at least 95% identity to an amino acid sequence of SEQ ID NO:884.

[0215] In one embodiment, the first antigen binding domain that specifically binds CD8, comprises: (i) a VH comprising a VH CDR1, a VH CDR2, and a VH CDR3 having an amino acid sequence of SEQ ID NOs:885, 886, and 887, respectively, and (ii) a VL comprising a VL CDR1, VL CDR2, and VL CDR3 having an amino acid sequence of SEQ ID NOs:888, 889, and 890, respectively. In one embodiment, the first antigen binding domain that specifically binds CD8, comprises: (i) a VH comprising a VH CDR1, a VH CDR2, and a VH CDR3 having an amino acid sequence of SEQ ID NOs:891, 892, and 893, respectively, and (ii) a VL comprising a VL CDR1, VL CDR2, and VL CDR3 having an amino acid sequence of SEQ ID NOs:894, 895, and 896, respectively. In one embodiment, the first antigen binding domain that specifically binds CD8, comprises: (i) a VH comprising a VH CDR1, a VH CDR2, and a VH CDR3 having an amino acid sequence of SEQ ID NOs:897, 898, and 899, respectively, and (ii) a VL comprising a VL CDR1, VL CDR2, and VL CDR3 having an amino acid sequence of SEQ ID NOs:900, 901, and 902, respectively. In one embodiment, the first antigen binding domain that specifically binds CD8, comprises: (i) a VH comprising a VH CDR1, a VH CDR2, and a VH CDR3 having an amino acid sequence of SEQ ID NOs:903, 904, and 905, respectively, and (ii) a VL comprising a VL CDR1, VL CDR2, and VL CDR3 having an amino acid sequence of SEQ ID NOs:906, 907, and 908, respectively. In one embodiment, the first antigen binding domain that specifically binds CD8, comprises: (i) a VH comprising a VH CDR1, a VH CDR2, and a VH CDR3 having an amino acid sequence of SEQ ID NOs:909, 910, and 911, respectively, and (ii) a VL comprising a VL CDR1, VL CDR2, and VL CDR3 having an amino acid sequence of SEQ ID NOs:912, 913, and 914, respectively. In one embodiment, the first antigen binding domain that specifically binds CD8, comprises: (i) a VH comprising a VH CDR1, a VH CDR2, and a VH CDR3 having an amino acid sequence of a VH CDR1, a VH CDR2, and a VH CDR3, respectively, of a VH having an amino acid sequence of SEQ ID NO:915; and (ii) a VL comprising a VL CDR1, a VL CDR2, and a VL CDR3 having an amino acid sequence of a VL CDR1, a VL CDR2, and a VL CDR3, respectively, of a VL having an amino acid sequence of SEQ ID NO:916. In one embodiment, the first antigen binding domain that specifically binds CD8, comprises a VH having an amino acid sequence of SEQ ID NO:915. In one embodiment, the first antigen binding domain that specifically binds CD8, comprises a VL having an amino acid sequence of SEQ ID NO:916. In one embodiment, the first antigen binding domain that specifically binds CD8, comprises a VH having an amino acid sequence of SEQ ID NO:915, and a VL having an amino acid sequence of SEQ ID NO:916. In one embodiment, the first antigen binding domain that specifically binds CD8, comprises a heavy chain having an amino acid sequence of SEQ ID NO:917. In one embodiment, the first antigen binding domain that specifically binds CD8, comprises a light chain having an amino acid sequence of SEQ ID NO:918. In one embodiment, the first antigen binding domain that specifically binds CD8, comprises a heavy chain having an amino acid sequence of SEQ ID NO:917, and a light chain having an amino acid sequence of SEQ ID NO:918. In one embodiment, the first antigen binding domain that specifically binds CD8, comprises a VH having an amino acid sequence having at least 95% identity to an amino acid sequence of SEQ ID NO:915. In one embodiment, the first antigen binding domain that specifically binds CD8, comprises a VL having an amino acid sequence having at least 95% identity to an amino acid sequence of SEQ ID NO:916. In one embodiment, the first antigen binding domain that specifically binds CD8, comprises a VH having an amino acid sequence having at least 95% identity to an amino acid sequence of SEQ ID NO:915, and a VL having an amino acid sequence having at least 95% identity to an amino acid sequence of SEQ ID NO:916. In one embodiment, the first antigen binding domain that specifically binds CD8, comprises a heavy chain having an amino acid sequence having at least 95% identity to an amino acid sequence of SEQ ID NO:917. In one embodiment, the first antigen binding domain that specifically binds CD8, comprises a light chain having an amino acid sequence having at least 95% identity to an amino acid sequence of SEQ ID NO:918. In one embodiment, the first antigen binding domain that specifically binds CD8, comprises a heavy chain having an amino acid sequence having at least 95% identity to an amino acid sequence of SEQ ID NO:917, and a light chain having an amino acid sequence having at least 95% identity to an amino acid sequence of SEQ ID NO:918.

[0216] In one embodiment, the first antigen binding domain that specifically binds CD8, comprises: (i) a VH comprising a VH CDR1, a VH CDR2, and a VH CDR3 having an amino acid sequence of SEQ ID NOs:919, 920, and 921, respectively, and (ii) a VL comprising a VL CDR1, VL CDR2, and VL CDR3 having an amino acid sequence of SEQ ID NOs:922, 923, and 924, respectively. In one embodiment, the first antigen binding domain that specifically binds CD8, comprises: (i) a VH comprising a VH CDR1, a VH CDR2, and a VH CDR3 having an amino acid sequence of SEQ ID NOs:925, 926, and 927, respectively, and (ii) a VL comprising a VL CDR1, VL CDR2, and VL CDR3 having an amino acid sequence of SEQ ID NOs:928, 929, and 930, respectively. In one embodiment, the first antigen binding domain that specifically binds CD8, comprises: (i) a VH comprising a VH CDR1, a VH CDR2, and a VH CDR3 having an amino acid sequence of SEQ ID NOs:931, 932, and 933, respectively, and (ii) a VL comprising a VL CDR1, VL CDR2, and VL CDR3 having an amino acid sequence of SEQ ID NOs:934, 935, and 936, respectively. In one embodiment, the first antigen binding domain that specifically binds CD8, comprises: (i) a VH comprising a VH CDR1, a VH CDR2, and a VH CDR3 having an amino acid sequence of SEQ ID NOs:937, 938, and 939, respectively, and (ii) a VL comprising a VL CDR1, VL CDR2, and VL CDR3 having an amino acid sequence of SEQ ID NOs:940, 941, and 942, respectively. In one embodiment, the first antigen binding domain that specifically binds CD8, comprises: (i) a VH comprising a VH CDR1, a VH CDR2, and a VH CDR3 having an amino acid sequence of SEQ ID NOs:943, 944, and 945, respectively, and (ii) a VL comprising a VL CDR1, VL CDR2, and VL CDR3 having an amino acid sequence of SEQ ID NOs:946, 947, and 948, respectively. In one embodiment, the first antigen binding domain that specifically binds CD8, comprises: (i) a VH comprising a VH CDR1, a VH CDR2, and a VH CDR3 having an amino acid sequence of a VH CDR1, a VH CDR2, and a VH CDR3, respectively, of a VH having an amino acid sequence of SEQ ID NO:949; and (ii) a VL comprising a VL CDR1, a VL CDR2, and a VL CDR3 having an amino acid sequence of a VL CDR1, a VL CDR2, and a VL CDR3, respectively, of a VL having an amino acid sequence of SEQ ID NO:950. In one embodiment, the first antigen binding domain that specifically binds CD8, comprises a VH having an amino acid sequence of SEQ ID NO:949. In one embodiment, the first antigen binding domain that specifically binds CD8, comprises a VL having an amino acid sequence of SEQ ID NO:950. In one embodiment, the first antigen binding domain that specifically binds CD8, comprises a VH having an amino acid sequence of SEQ ID NO:949, and a VL having an amino acid sequence of SEQ ID NO:950. In one embodiment, the first antigen binding domain that specifically binds CD8, comprises a heavy chain having an amino acid sequence of SEQ ID NO:951. In one embodiment, the first antigen binding domain that specifically binds CD8, comprises a light chain having an amino acid sequence of SEQ ID NO:952. In one embodiment, the first antigen binding domain that specifically binds CD8, comprises a heavy chain having an amino acid sequence of SEQ ID NO:951, and a light chain having an amino acid sequence of SEQ ID NO:952. In one embodiment, the first antigen binding domain that specifically binds CD8, comprises a VH having an amino acid sequence having at least 95% identity to an amino acid sequence of SEQ ID NO:949. In one embodiment, the first antigen binding domain that specifically binds CD8, comprises a VL having an amino acid sequence having at least 95% identity to an amino acid sequence of SEQ ID NO:950. In one embodiment, the first antigen binding domain that specifically binds CD8, comprises a VH having an amino acid sequence having at least 95% identity to an amino acid sequence of SEQ ID NO:949, and a VL having an amino acid sequence having at least 95% identity to an amino acid sequence of SEQ ID NO:950. In one embodiment, the first antigen binding domain that specifically binds CD8, comprises a heavy chain having an amino acid sequence having at least 95% identity to an amino acid sequence of SEQ ID NO:951. In one embodiment, the first antigen binding domain that specifically binds CD8, comprises a light chain having an amino acid sequence having at least 95% identity to an amino acid sequence of SEQ ID NO:952. In one embodiment, the first antigen binding domain that specifically binds CD8, comprises a heavy chain having an amino acid sequence having at least 95% identity to an amino acid sequence of SEQ ID NO:951, and a light chain having an amino acid sequence having at least 95% identity to an amino acid sequence of SEQ ID NO:952.

[0217] In one embodiment, the first antigen binding domain that specifically binds CD8, comprises: (i) a VH comprising a VH CDR1, a VH CDR2, and a VH CDR3 having an amino acid sequence of SEQ ID NOs:953, 954, and 955, respectively, and (ii) a VL comprising a VL CDR1, VL CDR2, and VL CDR3 having an amino acid sequence of SEQ ID NOs:956, 957, and 958, respectively. In one embodiment, the first antigen binding domain that specifically binds CD8, comprises: (i) a VH comprising a VH CDR1, a VH CDR2, and a VH CDR3 having an amino acid sequence of SEQ ID NOs:959, 960, and 961, respectively, and (ii) a VL comprising a VL CDR1, VL CDR2, and VL CDR3 having an amino acid sequence of SEQ ID NOs:962, 963, and 964, respectively. In one embodiment, the first antigen binding domain that specifically binds CD8, comprises: (i) a VH comprising a VH CDR1, a VH CDR2, and a VH CDR3 having an amino acid sequence of SEQ ID NOs:965, 966, and 967, respectively, and (ii) a VL comprising a VL CDR1, VL CDR2, and VL CDR3 having an amino acid sequence of SEQ ID NOs:968, 969, and 970, respectively. In one embodiment, the first antigen binding domain that specifically binds CD8, comprises: (i) a VH comprising a VH CDR1, a VH CDR2, and a VH CDR3 having an amino acid sequence of SEQ ID NOs:971, 972, and 973, respectively, and (ii) a VL comprising a VL CDR1, VL CDR2, and VL CDR3 having an amino acid sequence of SEQ ID NOs:974, 975, and 976, respectively. In one embodiment, the first antigen binding domain that specifically binds CD8, comprises: (i) a VH comprising a VH CDR1, a VH CDR2, and a VH CDR3 having an amino acid sequence of SEQ ID NOs:977, 978, and 979, respectively, and (ii) a VL comprising a VL CDR1, VL CDR2, and VL CDR3 having an amino acid sequence of SEQ ID NOs:980, 981, and 982, respectively. In one embodiment, the first antigen binding domain that specifically binds CD8, comprises: (i) a VH comprising a VH CDR1, a VH CDR2, and a VH CDR3 having an amino acid sequence of a VH CDR1, a VH CDR2, and a VH CDR3, respectively, of a VH having an amino acid sequence of SEQ ID NO:983; and (ii) a VL comprising a VL CDR1, a VL CDR2, and a VL CDR3 having an amino acid sequence of a VL CDR1, a VL CDR2, and a VL CDR3, respectively, of a VL having an amino acid sequence of SEQ ID NO:984. In one embodiment, the first antigen binding domain that specifically binds CD8, comprises a VH having an amino acid sequence of SEQ ID NO:983. In one embodiment, the first antigen binding domain that specifically binds CD8, comprises a VL having an amino acid sequence of SEQ ID NO:984. In one embodiment, the first antigen binding domain that specifically binds CD8, comprises a VH having an amino acid sequence of SEQ ID NO:983, and a VL having an amino acid sequence of SEQ ID NO:984. In one embodiment, the first antigen binding domain that specifically binds CD8, comprises a heavy chain having an amino acid sequence of SEQ ID NO:985. In one embodiment, the first antigen binding domain that specifically binds CD8, comprises a light chain having an amino acid sequence of SEQ ID NO:986. In one embodiment, the first antigen binding domain that specifically binds CD8, comprises a heavy chain having an amino acid sequence of SEQ ID NO:985, and a light chain having an amino acid sequence of SEQ ID NO:986. In one embodiment, the first antigen binding domain that specifically binds CD8, comprises a VH having an amino acid sequence having at least 95% identity to an amino acid sequence of SEQ ID NO:983. In one embodiment, the first antigen binding domain that specifically binds CD8, comprises a VL having an amino acid sequence having at least 95% identity to an amino acid sequence of SEQ ID NO:984. In one embodiment, the first antigen binding domain that specifically binds CD8, comprises a VH having an amino acid sequence having at least 95% identity to an amino acid sequence of SEQ ID NO:983, and a VL having an amino acid sequence having at least 95% identity to an amino acid sequence of SEQ ID NO:984. In one embodiment, the first antigen binding domain that specifically binds CD8, comprises a heavy chain having an amino acid sequence having at least 95% identity to an amino acid sequence of SEQ ID NO:985. In one embodiment, the first antigen binding domain that specifically binds CD8, comprises a light chain having an amino acid sequence having at least 95% identity to an amino acid sequence of SEQ ID NO:986. In one embodiment, the first antigen binding domain that specifically binds CD8, comprises a heavy chain having an amino acid sequence having at least 95% identity to an amino acid sequence of SEQ ID NO:985, and a light chain having an amino acid sequence having at least 95% identity to an amino acid sequence of SEQ ID NO:986.

[0218] In one embodiment, the first antigen binding domain that specifically binds CD8, comprises: (i) a VH comprising a VH CDR1, a VH CDR2, and a VH CDR3 having an amino acid sequence of SEQ ID NOs:987, 988, and 989, respectively, and (ii) a VL comprising a VL CDR1, VL CDR2, and VL CDR3 having an amino acid sequence of SEQ ID NOs:990, 991, and 992, respectively. In one embodiment, the first antigen binding domain that specifically binds CD8, comprises: (i) a VH comprising a VH CDR1, a VH CDR2, and a VH CDR3 having an amino acid sequence of SEQ ID NOs:993, 994, and 995, respectively, and (ii) a VL comprising a VL CDR1, VL CDR2, and VL CDR3 having an amino acid sequence of SEQ ID NOs:996, 997, and 998, respectively. In one embodiment, the first antigen binding domain that specifically binds CD8, comprises: (i) a VH comprising a VH CDR1, a VH CDR2, and a VH CDR3 having an amino acid sequence of SEQ ID NOs:999, 1000, and 1001, respectively, and (ii) a VL comprising a VL CDR1, VL CDR2, and VL CDR3 having an amino acid sequence of SEQ ID NOs:1002, 1003, and 1004, respectively. In one embodiment, the first antigen binding domain that specifically binds CD8, comprises: (i) a VH comprising a VH CDR1, a VH CDR2, and a VH CDR3 having an amino acid sequence of SEQ ID NOs:1005, 1006, and 1007, respectively, and (ii) a VL comprising a VL CDR1, VL CDR2, and VL CDR3 having an amino acid sequence of SEQ ID NOs:1008, 1009, and 1010, respectively. In one embodiment, the first antigen binding domain that specifically binds CD8, comprises: (i) a VH comprising a VH CDR1, a VH CDR2, and a VH CDR3 having an amino acid sequence of SEQ ID NOs:1011, 1012, and 1013, respectively, and (ii) a VL comprising a VL CDR1, VL CDR2, and VL CDR3 having an amino acid sequence of SEQ ID NOs:1014, 1015, and 1016, respectively. In one embodiment, the first antigen binding domain that specifically binds CD8, comprises: (i) a VH comprising a VH CDR1, a VH CDR2, and a VH CDR3 having an amino acid sequence of a VH CDR1, a VH CDR2, and a VH CDR3, respectively, of a VH having an amino acid sequence of SEQ ID NO:1017; and (ii) a VL comprising a VL CDR1, a VL CDR2, and a VL CDR3 having an amino acid sequence of a VL CDR1, a VL CDR2, and a VL CDR3, respectively, of a VL having an amino acid sequence of SEQ ID NO:1018. In one embodiment, the first antigen binding domain that specifically binds CD8, comprises a VH having an amino acid sequence of SEQ ID NO:1017. In one embodiment, the first antigen binding domain that specifically binds CD8, comprises a VL having an amino acid sequence of SEQ ID NO:1018. In one embodiment, the first antigen binding domain that specifically binds CD8, comprises a VH having an amino acid sequence of SEQ ID NO:1017, and a VL having an amino acid sequence of SEQ ID NO:1018. In one embodiment, the first antigen binding domain that specifically binds CD8, comprises a heavy chain having an amino acid sequence of SEQ ID NO:1019. In one embodiment, the first antigen binding domain that specifically binds CD8, comprises a light chain having an amino acid sequence of SEQ ID NO:1020. In one embodiment, the first antigen binding domain that specifically binds CD8, comprises a heavy chain having an amino acid sequence of SEQ ID NO:1019, and a light chain having an amino acid sequence of SEQ ID NO:1020. In one embodiment, the first antigen binding domain that specifically binds CD8, comprises a VH having an amino acid sequence having at least 95% identity to an amino acid sequence of SEQ ID NO:1017. In one embodiment, the first antigen binding domain that specifically binds CD8, comprises a VL having an amino acid sequence having at least 95% identity to an amino acid sequence of SEQ ID NO:1018. In one embodiment, the first antigen binding domain that specifically binds CD8, comprises a VH having an amino acid sequence having at least 95% identity to an amino acid sequence of SEQ ID NO:1017, and a VL having an amino acid sequence having at least 95% identity to an amino acid sequence of SEQ ID NO:1018. In one embodiment, the first antigen binding domain that specifically binds CD8, comprises a heavy chain having an amino acid sequence having at least 95% identity to an amino acid sequence of SEQ ID NO:1019. In one embodiment, the first antigen binding domain that specifically binds CD8, comprises a light chain having an amino acid sequence having at least 95% identity to an amino acid sequence of SEQ ID NO:1020. In one embodiment, the first antigen binding domain that specifically binds CD8, comprises a heavy chain having an amino acid sequence having at least 95% identity to an amino acid sequence of SEQ ID NO:1019, and a light chain having an amino acid sequence having at least 95% identity to an amino acid sequence of SEQ ID NO:1020.

[0219] In one embodiment, the first antigen binding domain that specifically binds CD8, comprises: (i) a VH comprising a VH CDR1, a VH CDR2, and a VH CDR3 having an amino acid sequence of SEQ ID NOs:1021, 1022, and 1023, respectively, and (ii) a VL comprising a VL CDR1, VL CDR2, and VL CDR3 having an amino acid sequence of SEQ ID NOs:1024, 1025, and 1026, respectively. In one embodiment, the first antigen binding domain that specifically binds CD8, comprises: (i) a VH comprising a VH CDR1, a VH CDR2, and a VH CDR3 having an amino acid sequence of SEQ ID NOs:1027, 1028, and 1029, respectively, and (ii) a VL comprising a VL CDR1, VL CDR2, and VL CDR3 having an amino acid sequence of SEQ ID NOs:1030, 1031, and 1032, respectively. In one embodiment, the first antigen binding domain that specifically binds CD8, comprises: (i) a VH comprising a VH CDR1, a VH CDR2, and a VH CDR3 having an amino acid sequence of SEQ ID NOs:1033, 1034, and 1035, respectively, and (ii) a VL comprising a VL CDR1, VL CDR2, and VL CDR3 having an amino acid sequence of SEQ ID NOs:1036, 1037, and 1038, respectively. In one embodiment, the first antigen binding domain that specifically binds CD8, comprises: (i) a VH comprising a VH CDR1, a VH CDR2, and a VH CDR3 having an amino acid sequence of SEQ ID NOs:1039, 1040, and 1041, respectively, and (ii) a VL comprising a VL CDR1, VL CDR2, and VL CDR3 having an amino acid sequence of SEQ ID NOs:1042, 1043, and 1044, respectively. In one embodiment, the first antigen binding domain that specifically binds CD8, comprises: (i) a VH comprising a VH CDR1, a VH CDR2, and a VH CDR3 having an amino acid sequence of SEQ ID NOs:1045, 1046, and 1047, respectively, and (ii) a VL comprising a VL CDR1, VL CDR2, and VL CDR3 having an amino acid sequence of SEQ ID NOs:1048, 1049, and 1050, respectively. In one embodiment, the first antigen binding domain that specifically binds CD8, comprises: (i) a VH comprising a VH CDR1, a VH CDR2, and a VH CDR3 having an amino acid sequence of a VH CDR1, a VH CDR2, and a VH CDR3, respectively, of a VH having an amino acid sequence of SEQ ID NO:1051; and (ii) a VL comprising a VL CDR1, a VL CDR2, and a VL CDR3 having an amino acid sequence of a VL CDR1, a VL CDR2, and a VL CDR3, respectively, of a VL having an amino acid sequence of SEQ ID NO:1052. In one embodiment, the first antigen binding domain that specifically binds CD8, comprises a VH having an amino acid sequence of SEQ ID NO:1051. In one embodiment, the first antigen binding domain that specifically binds CD8, comprises a VL having an amino acid sequence of SEQ ID NO:1052. In one embodiment, the first antigen binding domain that specifically binds CD8, comprises a VH having an amino acid sequence of SEQ ID NO:1051, and a VL having an amino acid sequence of SEQ ID NO:1052. In one embodiment, the first antigen binding domain that specifically binds CD8, comprises a heavy chain having an amino acid sequence of SEQ ID NO:1053. In one embodiment, the first antigen binding domain that specifically binds CD8, comprises a light chain having an amino acid sequence of SEQ ID NO:1054. In one embodiment, the first antigen binding domain that specifically binds CD8, comprises a heavy chain having an amino acid sequence of SEQ ID NO:1053, and a light chain having an amino acid sequence of SEQ ID NO:1054. In one embodiment, the first antigen binding domain that specifically binds CD8, comprises a VH having an amino acid sequence having at least 95% identity to an amino acid sequence of SEQ ID NO:1051. In one embodiment, the first antigen binding domain that specifically binds CD8, comprises a VL having an amino acid sequence having at least 95% identity to an amino acid sequence of SEQ ID NO:1052. In one embodiment, the first antigen binding domain that specifically binds CD8, comprises a VH having an amino acid sequence having at least 95% identity to an amino acid sequence of SEQ ID NO:1051, and a VL having an amino acid sequence having at least 95% identity to an amino acid sequence of SEQ ID NO:1052. In one embodiment, the first antigen binding domain that specifically binds CD8, comprises a heavy chain having an amino acid sequence having at least 95% identity to an amino acid sequence of SEQ ID NO:1053. In one embodiment, the first antigen binding domain that specifically binds CD8, comprises a light chain having an amino acid sequence having at least 95% identity to an amino acid sequence of SEQ ID NO:1054. In one embodiment, the first antigen binding domain that specifically binds CD8, comprises a heavy chain having an amino acid sequence having at least 95% identity to an amino acid sequence of SEQ ID NO:1053, and a light chain having an amino acid sequence having at least 95% identity to an amino acid sequence of SEQ ID NO:1054.

[0220] In one embodiment, the first antigen binding domain that specifically binds CD8, comprises: (i) a VH comprising a VH CDR1, a VH CDR2, and a VH CDR3 having an amino acid sequence of SEQ ID NOs:1055, 1056, and 1057, respectively, and (ii) a VL comprising a VL CDR1, VL CDR2, and VL CDR3 having an amino acid sequence of SEQ ID NOs:1058, 1059, and 1060, respectively. In one embodiment, the first antigen binding domain that specifically binds CD8, comprises: (i) a VH comprising a VH CDR1, a VH CDR2, and a VH CDR3 having an amino acid sequence of SEQ ID NOs:1061, 1062, and 1063, respectively, and (ii) a VL comprising a VL CDR1, VL CDR2, and VL CDR3 having an amino acid sequence of SEQ ID NOs:1064, 1065, and 1066, respectively. In one embodiment, the first antigen binding domain that specifically binds CD8, comprises: (i) a VH comprising a VH CDR1, a VH CDR2, and a VH CDR3 having an amino acid sequence of SEQ ID NOs:1067, 1068, and 1069, respectively, and (ii) a VL comprising a VL CDR1, VL CDR2, and VL CDR3 having an amino acid sequence of SEQ ID NOs:1070, 1071, and 1072, respectively. In one embodiment, the first antigen binding domain that specifically binds CD8, comprises: (i) a VH comprising a VH CDR1, a VH CDR2, and a VH CDR3 having an amino acid sequence of SEQ ID NOs:1073, 1074, and 1075, respectively, and (ii) a VL comprising a VL CDR1, VL CDR2, and VL CDR3 having an amino acid sequence of SEQ ID NOs:1076, 1077, and 1078, respectively. In one embodiment, the first antigen binding domain that specifically binds CD8, comprises: (i) a VH comprising a VH CDR1, a VH CDR2, and a VH CDR3 having an amino acid sequence of SEQ ID NOs:1079, 1080, and 1081, respectively, and (ii) a VL comprising a VL CDR1, VL CDR2, and VL CDR3 having an amino acid sequence of SEQ ID NOs:1082, 1083, and 1084, respectively. In one embodiment, the first antigen binding domain that specifically binds CD8, comprises: (i) a VH comprising a VH CDR1, a VH CDR2, and a VH CDR3 having an amino acid sequence of a VH CDR1, a VH CDR2, and a VH CDR3, respectively, of a VH having an amino acid sequence of SEQ ID NO:1085; and (ii) a VL comprising a VL CDR1, a VL CDR2, and a VL CDR3 having an amino acid sequence of a VL CDR1, a VL CDR2, and a VL CDR3, respectively, of a VL having an amino acid sequence of SEQ ID NO:1086. In one embodiment, the first antigen binding domain that specifically binds CD8, comprises a VH having an amino acid sequence of SEQ ID NO:1085. In one embodiment, the first antigen binding domain that specifically binds CD8, comprises a VL having an amino acid sequence of SEQ ID NO:1086. In one embodiment, the first antigen binding domain that specifically binds CD8, comprises a VH having an amino acid sequence of SEQ ID NO:1085, and a VL having an amino acid sequence of SEQ ID NO:1086. In one embodiment, the first antigen binding domain that specifically binds CD8, comprises a heavy chain having an amino acid sequence of SEQ ID NO:1087. In one embodiment, the first antigen binding domain that specifically binds CD8, comprises a light chain having an amino acid sequence of SEQ ID NO:1088. In one embodiment, the first antigen binding domain that specifically binds CD8, comprises a heavy chain having an amino acid sequence of SEQ ID NO:1087, and a light chain having an amino acid sequence of SEQ ID NO:1088. In one embodiment, the first antigen binding domain that specifically binds CD8, comprises a VH having an amino acid sequence having at least 95% identity to an amino acid sequence of SEQ ID NO:1085. In one embodiment, the first antigen binding domain that specifically binds CD8, comprises a VL having an amino acid sequence having at least 95% identity to an amino acid sequence of SEQ ID NO:1086. In one embodiment, the first antigen binding domain that specifically binds CD8, comprises a VH having an amino acid sequence having at least 95% identity to an amino acid sequence of SEQ ID NO:1085, and a VL having an amino acid sequence having at least 95% identity to an amino acid sequence of SEQ ID NO:1086. In one embodiment, the first antigen binding domain that specifically binds CD8, comprises a heavy chain having an amino acid sequence having at least 95% identity to an amino acid sequence of SEQ ID NO:1087. In one embodiment, the first antigen binding domain that specifically binds CD8, comprises a light chain having an amino acid sequence having at least 95% identity to an amino acid sequence of SEQ ID NO:1088. In one embodiment, the first antigen binding domain that specifically binds CD8, comprises a heavy chain having an amino acid sequence having at least 95% identity to an amino acid sequence of SEQ ID NO:1087, and a light chain having an amino acid sequence having at least 95% identity to an amino acid sequence of SEQ ID NO:1088.

[0221] In one embodiment, the first antigen binding domain that specifically binds CD8, comprises: (i) a VH comprising a VH CDR1, a VH CDR2, and a VH CDR3 having an amino acid sequence of SEQ ID NOs:1089, 1090, and 1091, respectively, and (ii) a VL comprising a VL CDR1, VL CDR2, and VL CDR3 having an amino acid sequence of SEQ ID NOs:1092, 1093, and 1094, respectively. In one embodiment, the first antigen binding domain that specifically binds CD8, comprises: (i) a VH comprising a VH CDR1, a VH CDR2, and a VH CDR3 having an amino acid sequence of SEQ ID NOs:1095, 1096, and 1097, respectively, and (ii) a VL comprising a VL CDR1, VL CDR2, and VL CDR3 having an amino acid sequence of SEQ ID NOs:1098, 1099, and 1100, respectively. In one embodiment, the first antigen binding domain that specifically binds CD8, comprises: (i) a VH comprising a VH CDR1, a VH CDR2, and a VH CDR3 having an amino acid sequence of SEQ ID NOs:1101, 1102, and 1103, respectively, and (ii) a VL comprising a VL CDR1, VL CDR2, and VL CDR3 having an amino acid sequence of SEQ ID NOs:1104, 1105, and 1106, respectively. In one embodiment, the first antigen binding domain that specifically binds CD8, comprises: (i) a VH comprising a VH CDR1, a VH CDR2, and a VH CDR3 having an amino acid sequence of SEQ ID NOs:1107, 1108, and 1109, respectively, and (ii) a VL comprising a VL CDR1, VL CDR2, and VL CDR3 having an amino acid sequence of SEQ ID NOs:1110, 1111, and 1112, respectively. In one embodiment, the first antigen binding domain that specifically binds CD8, comprises: (i) a VH comprising a VH CDR1, a VH CDR2, and a VH CDR3 having an amino acid sequence of SEQ ID NOs:1113, 1114, and 1115, respectively, and (ii) a VL comprising a VL CDR1, VL CDR2, and VL CDR3 having an amino acid sequence of SEQ ID NOs:1116, 1117, and 1118, respectively. In one embodiment, the first antigen binding domain that specifically binds CD8, comprises: (i) a VH comprising a VH CDR1, a VH CDR2, and a VH CDR3 having an amino acid sequence of a VH CDR1, a VH CDR2, and a VH CDR3, respectively, of a VH having an amino acid sequence of SEQ ID NO:1119; and (ii) a VL comprising a VL CDR1, a VL CDR2, and a VL CDR3 having an amino acid sequence of a VL CDR1, a VL CDR2, and a VL CDR3, respectively, of a VL having an amino acid sequence of SEQ ID NO:1120. In one embodiment, the first antigen binding domain that specifically binds CD8, comprises a VH having an amino acid sequence of SEQ ID NO:1119. In one embodiment, the first antigen binding domain that specifically binds CD8, comprises a VL having an amino acid sequence of SEQ ID NO:1120. In one embodiment, the first antigen binding domain that specifically binds CD8, comprises a VH having an amino acid sequence of SEQ ID NO:1119, and a VL having an amino acid sequence of SEQ ID NO:1120. In one embodiment, the first antigen binding domain that specifically binds CD8, comprises a heavy chain having an amino acid sequence of SEQ ID NO:1121. In one embodiment, the first antigen binding domain that specifically binds CD8, comprises a light chain having an amino acid sequence of SEQ ID NO:1122. In one embodiment, the first antigen binding domain that specifically binds CD8, comprises a heavy chain having an amino acid sequence of SEQ ID NO:1121, and a light chain having an amino acid sequence of SEQ ID NO:1122. In one embodiment, the first antigen binding domain that specifically binds CD8, comprises a VH having an amino acid sequence having at least 95% identity to an amino acid sequence of SEQ ID NO:1119. In one embodiment, the first antigen binding domain that specifically binds CD8, comprises a VL having an amino acid sequence having at least 95% identity to an amino acid sequence of SEQ ID NO:1120. In one embodiment, the first antigen binding domain that specifically binds CD8, comprises a VH having an amino acid sequence having at least 95% identity to an amino acid sequence of SEQ ID NO:1119, and a VL having an amino acid sequence having at least 95% identity to an amino acid sequence of SEQ ID NO:1120. In one embodiment, the first antigen binding domain that specifically binds CD8, comprises a heavy chain having an amino acid sequence having at least 95% identity to an amino acid sequence of SEQ ID NO:1121. In one embodiment, the first antigen binding domain that specifically binds CD8, comprises a light chain having an amino acid sequence having at least 95% identity to an amino acid sequence of SEQ ID NO:1122. In one embodiment, the first antigen binding domain that specifically binds CD8, comprises a heavy chain having an amino acid sequence having at least 95% identity to an amino acid sequence of SEQ ID NO:1121, and a light chain having an amino acid sequence having at least 95% identity to an amino acid sequence of SEQ ID NO:1122.

[0222] In one embodiment, the first antigen binding domain that specifically binds CD8, comprises: (i) a VH comprising a VH CDR1, a VH CDR2, and a VH CDR3 having an amino acid sequence of SEQ ID NOs:1123, 1124, and 1125, respectively, and (ii) a VL comprising a VL CDR1, VL CDR2, and VL CDR3 having an amino acid sequence of SEQ ID NOs:1126, 1127, and 1128, respectively. In one embodiment, the first antigen binding domain that specifically binds CD8, comprises: (i) a VH comprising a VH CDR1, a VH CDR2, and a VH CDR3 having an amino acid sequence of SEQ ID NOs:1129, 1130, and 1131, respectively, and (ii) a VL comprising a VL CDR1, VL CDR2, and VL CDR3 having an amino acid sequence of SEQ ID NOs:1132, 1133, and 1134, respectively. In one embodiment, the first antigen binding domain that specifically binds CD8, comprises: (i) a VH comprising a VH CDR1, a VH CDR2, and a VH CDR3 having an amino acid sequence of SEQ ID NOs:1135, 1136, and 1137, respectively, and (ii) a VL comprising a VL CDR1, VL CDR2, and VL CDR3 having an amino acid sequence of SEQ ID NOs:1138, 1139, and 1140, respectively. In one embodiment, the first antigen binding domain that specifically binds CD8, comprises: (i) a VH comprising a VH CDR1, a VH CDR2, and a VH CDR3 having an amino acid sequence of SEQ ID NOs:1141, 1142, and 1143, respectively, and (ii) a VL comprising a VL CDR1, VL CDR2, and VL CDR3 having an amino acid sequence of SEQ ID NOs:1144, 1145, and 1146, respectively. In one embodiment, the first antigen binding domain that specifically binds CD8, comprises: (i) a VH comprising a VH CDR1, a VH CDR2, and a VH CDR3 having an amino acid sequence of SEQ ID NOs:1147, 1148, and 1149, respectively, and (ii) a VL comprising a VL CDR1, VL CDR2, and VL CDR3 having an amino acid sequence of SEQ ID NOs:1150, 1151, and 1152, respectively. In one embodiment, the first antigen binding domain that specifically binds CD8, comprises: (i) a VH comprising a VH CDR1, a VH CDR2, and a VH CDR3 having an amino acid sequence of a VH CDR1, a VH CDR2, and a VH CDR3, respectively, of a VH having an amino acid sequence of SEQ ID NO:1153; and (ii) a VL comprising a VL CDR1, a VL CDR2, and a VL CDR3 having an amino acid sequence of a VL CDR1, a VL CDR2, and a VL CDR3, respectively, of a VL having an amino acid sequence of SEQ ID NO:1154. In one embodiment, the first antigen binding domain that specifically binds CD8, comprises a VH having an amino acid sequence of SEQ ID NO:1153. In one embodiment, the first antigen binding domain that specifically binds CD8, comprises a VL having an amino acid sequence of SEQ ID NO:1154. In one embodiment, the first antigen binding domain that specifically binds CD8, comprises a VH having an amino acid sequence of SEQ ID NO:1153, and a VL having an amino acid sequence of SEQ ID NO:1154. In one embodiment, the first antigen binding domain that specifically binds CD8, comprises a heavy chain having an amino acid sequence of SEQ ID NO:1155. In one embodiment, the first antigen binding domain that specifically binds CD8, comprises a light chain having an amino acid sequence of SEQ ID NO:1156. In one embodiment, the first antigen binding domain that specifically binds CD8, comprises a heavy chain having an amino acid sequence of SEQ ID NO:1155, and a light chain having an amino acid sequence of SEQ ID NO:1156. In one embodiment, the first antigen binding domain that specifically binds CD8, comprises a VH having an amino acid sequence having at least 95% identity to an amino acid sequence of SEQ ID NO:1153. In one embodiment, the first antigen binding domain that specifically binds CD8, comprises a VL having an amino acid sequence having at least 95% identity to an amino acid sequence of SEQ ID NO:1154. In one embodiment, the first antigen binding domain that specifically binds CD8, comprises a VH having an amino acid sequence having at least 95% identity to an amino acid sequence of SEQ ID NO:1153, and a VL having an amino acid sequence having at least 95% identity to an amino acid sequence of SEQ ID NO:1154. In one embodiment, the first antigen binding domain that specifically binds CD8, comprises a heavy chain having an amino acid sequence having at least 95% identity to an amino acid sequence of SEQ ID NO:1155. In one embodiment, the first antigen binding domain that specifically binds CD8, comprises a light chain having an amino acid sequence having at least 95% identity to an amino acid sequence of SEQ ID NO:1156. In one embodiment, the first antigen binding domain that specifically binds CD8, comprises a heavy chain having an amino acid sequence having at least 95% identity to an amino acid sequence of SEQ ID NO:1155, and a light chain having an amino acid sequence having at least 95% identity to an amino acid sequence of SEQ ID NO:1156.

[0223] In one embodiment, the first antigen binding domain that specifically binds CD8, comprises: (i) a VH comprising a VH CDR1, a VH CDR2, and a VH CDR3 having an amino acid sequence of SEQ ID NOs:1157, 1158, and 1159, respectively, and (ii) a VL comprising a VL CDR1, VL CDR2, and VL CDR3 having an amino acid sequence of SEQ ID NOs:1160, 1161, and 1162, respectively. In one embodiment, the first antigen binding domain that specifically binds CD8, comprises: (i) a VH comprising a VH CDR1, a VH CDR2, and a VH CDR3 having an amino acid sequence of SEQ ID NOs:1163, 1164, and 1165, respectively, and (ii) a VL comprising a VL CDR1, VL CDR2, and VL CDR3 having an amino acid sequence of SEQ ID NOs:1166, 1167, and 1168, respectively. In one embodiment, the first antigen binding domain that specifically binds CD8, comprises: (i) a VH comprising a VH CDR1, a VH CDR2, and a VH CDR3 having an amino acid sequence of SEQ ID NOs:1169, 1170, and 1171, respectively, and (ii) a VL comprising a VL CDR1, VL CDR2, and VL CDR3 having an amino acid sequence of SEQ ID NOs:1172, 1173, and 1174, respectively. In one embodiment, the first antigen binding domain that specifically binds CD8, comprises: (i) a VH comprising a VH CDR1, a VH CDR2, and a VH CDR3 having an amino acid sequence of SEQ ID NOs:1175, 1176, and 1177, respectively, and (ii) a VL comprising a VL CDR1, VL CDR2, and VL CDR3 having an amino acid sequence of SEQ ID NOs:1178, 1179, and 1180, respectively. In one embodiment, the first antigen binding domain that specifically binds CD8, comprises: (i) a VH comprising a VH CDR1, a VH CDR2, and a VH CDR3 having an amino acid sequence of SEQ ID NOs:1181, 1182, and 1183, respectively, and (ii) a VL comprising a VL CDR1, VL CDR2, and VL CDR3 having an amino acid sequence of SEQ ID NOs:1184, 1185, and 1186, respectively. In one embodiment, the first antigen binding domain that specifically binds CD8, comprises: (i) a VH comprising a VH CDR1, a VH CDR2, and a VH CDR3 having an amino acid sequence of a VH CDR1, a VH CDR2, and a VH CDR3, respectively, of a VH having an amino acid sequence of SEQ ID NO:1187; and (ii) a VL comprising a VL CDR1, a VL CDR2, and a VL CDR3 having an amino acid sequence of a VL CDR1, a VL CDR2, and a VL CDR3, respectively, of a VL having an amino acid sequence of SEQ ID NO:1188. In one embodiment, the first antigen binding domain that specifically binds CD8, comprises a VH having an amino acid sequence of SEQ ID NO:1187. In one embodiment, the first antigen binding domain that specifically binds CD8, comprises a VL having an amino acid sequence of SEQ ID NO:1188. In one embodiment, the first antigen binding domain that specifically binds CD8, comprises a VH having an amino acid sequence of SEQ ID NO:1187, and a VL having an amino acid sequence of SEQ ID NO:1188. In one embodiment, the first antigen binding domain that specifically binds CD8, comprises a heavy chain having an amino acid sequence of SEQ ID NO:1189. In one embodiment, the first antigen binding domain that specifically binds CD8, comprises a light chain having an amino acid sequence of SEQ ID NO:1190. In one embodiment, the first antigen binding domain that specifically binds CD8, comprises a heavy chain having an amino acid sequence of SEQ ID NO:1189, and a light chain having an amino acid sequence of SEQ ID NO:1190. In one embodiment, the first antigen binding domain that specifically binds CD8, comprises a VH having an amino acid sequence having at least 95% identity to an amino acid sequence of SEQ ID NO:1187. In one embodiment, the first antigen binding domain that specifically binds CD8, comprises a VL having an amino acid sequence having at least 95% identity to an amino acid sequence of SEQ ID NO:1188. In one embodiment, the first antigen binding domain that specifically binds CD8, comprises a VH having an amino acid sequence having at least 95% identity to an amino acid sequence of SEQ ID NO:1187, and a VL having an amino acid sequence having at least 95% identity to an amino acid sequence of SEQ ID NO:1188. In one embodiment, the first antigen binding domain that specifically binds CD8, comprises a heavy chain having an amino acid sequence having at least 95% identity to an amino acid sequence of SEQ ID NO:1189. In one embodiment, the first antigen binding domain that specifically binds CD8, comprises a light chain having an amino acid sequence having at least 95% identity to an amino acid sequence of SEQ ID NO:1190. In one embodiment, the first antigen binding domain that specifically binds CD8, comprises a heavy chain having an amino acid sequence having at least 95% identity to an amino acid sequence of SEQ ID NO:1189, and a light chain having an amino acid sequence having at least 95% identity to an amino acid sequence of SEQ ID NO:1190.

[0224] In one embodiment, the first antigen binding domain that specifically binds CD8, comprises: (i) a VH comprising a VH CDR1, a VH CDR2, and a VH CDR3 having an amino acid sequence of SEQ ID NOs:1191, 1192, and 1193, respectively, and (ii) a VL comprising a VL CDR1, VL CDR2, and VL CDR3 having an amino acid sequence of SEQ ID NOs:1194, 1195, and 1196, respectively. In one embodiment, the first antigen binding domain that specifically binds CD8, comprises: (i) a VH comprising a VH CDR1, a VH CDR2, and a VH CDR3 having an amino acid sequence of SEQ ID NOs:1197, 1198, and 1199, respectively, and (ii) a VL comprising a VL CDR1, VL CDR2, and VL CDR3 having an amino acid sequence of SEQ ID NOs:1200, 1201, and 1202, respectively. In one embodiment, the first antigen binding domain that specifically binds CD8, comprises: (i) a VH comprising a VH CDR1, a VH CDR2, and a VH CDR3 having an amino acid sequence of SEQ ID NOs:1203, 1204, and 1205, respectively, and (ii) a VL comprising a VL CDR1, VL CDR2, and VL CDR3 having an amino acid sequence of SEQ ID NOs:1206, 1207, and 1208, respectively. In one embodiment, the first antigen binding domain that specifically binds CD8, comprises: (i) a VH comprising a VH CDR1, a VH CDR2, and a VH CDR3 having an amino acid sequence of SEQ ID NOs:1209, 1210, and 1211, respectively, and (ii) a VL comprising a VL CDR1, VL CDR2, and VL CDR3 having an amino acid sequence of SEQ ID NOs:1212, 1213, and 1214, respectively. In one embodiment, the first antigen binding domain that specifically binds CD8, comprises: (i) a VH comprising a VH CDR1, a VH CDR2, and a VH CDR3 having an amino acid sequence of SEQ ID NOs:1215, 1216, and 1217, respectively, and (ii) a VL comprising a VL CDR1, VL CDR2, and VL CDR3 having an amino acid sequence of SEQ ID NOs:1218, 1219, and 1220, respectively. In one embodiment, the first antigen binding domain that specifically binds CD8, comprises: (i) a VH comprising a VH CDR1, a VH CDR2, and a VH CDR3 having an amino acid sequence of a VH CDR1, a VH CDR2, and a VH CDR3, respectively, of a VH having an amino acid sequence of SEQ ID NO:1221; and (ii) a VL comprising a VL CDR1, a VL CDR2, and a VL CDR3 having an amino acid sequence of a VL CDR1, a VL CDR2, and a VL CDR3, respectively, of a VL having an amino acid sequence of SEQ ID NO:1222. In one embodiment, the first antigen binding domain that specifically binds CD8, comprises a VH having an amino acid sequence of SEQ ID NO:1221. In one embodiment, the first antigen binding domain that specifically binds CD8, comprises a VL having an amino acid sequence of SEQ ID NO:1222. In one embodiment, the first antigen binding domain that specifically binds CD8, comprises a VH having an amino acid sequence of SEQ ID NO:1221, and a VL having an amino acid sequence of SEQ ID NO:1222. In one embodiment, the first antigen binding domain that specifically binds CD8, comprises a heavy chain having an amino acid sequence of SEQ ID NO:1223. In one embodiment, the first antigen binding domain that specifically binds CD8, comprises a light chain having an amino acid sequence of SEQ ID NO:1224. In one embodiment, the first antigen binding domain that specifically binds CD8, comprises a heavy chain having an amino acid sequence of SEQ ID NO:1223, and a light chain having an amino acid sequence of SEQ ID NO:1224. In one embodiment, the first antigen binding domain that specifically binds CD8, comprises a VH having an amino acid sequence having at least 95% identity to an amino acid sequence of SEQ ID NO:1221. In one embodiment, the first antigen binding domain that specifically binds CD8, comprises a VL having an amino acid sequence having at least 95% identity to an amino acid sequence of SEQ ID NO:1222. In one embodiment, the first antigen binding domain that specifically binds CD8, comprises a VH having an amino acid sequence having at least 95% identity to an amino acid sequence of SEQ ID NO:1221, and a VL having an amino acid sequence having at least 95% identity to an amino acid sequence of SEQ ID NO:1222. In one embodiment, the first antigen binding domain that specifically binds CD8, comprises a heavy chain having an amino acid sequence having at least 95% identity to an amino acid sequence of SEQ ID NO:1223. In one embodiment, the first antigen binding domain that specifically binds CD8, comprises a light chain having an amino acid sequence having at least 95% identity to an amino acid sequence of SEQ ID NO:1224. In one embodiment, the first antigen binding domain that specifically binds CD8, comprises a heavy chain having an amino acid sequence having at least 95% identity to an amino acid sequence of SEQ ID NO:1223, and a light chain having an amino acid sequence having at least 95% identity to an amino acid sequence of SEQ ID NO:1224.

[0225] In one embodiment, the first antigen binding domain that specifically binds CD8, comprises: (i) a VH comprising a VH CDR1, a VH CDR2, and a VH CDR3 having an amino acid sequence of SEQ ID NOs:1225, 1226, and 1227, respectively, and (ii) a VL comprising a VL CDR1, VL CDR2, and VL CDR3 having an amino acid sequence of SEQ ID NOs:1228, 1229, and 1230, respectively. In one embodiment, the first antigen binding domain that specifically binds CD8, comprises: (i) a VH comprising a VH CDR1, a VH CDR2, and a VH CDR3 having an amino acid sequence of SEQ ID NOs:1231, 1232, and 1233, respectively, and (ii) a VL comprising a VL CDR1, VL CDR2, and VL CDR3 having an amino acid sequence of SEQ ID NOs:1234, 1235, and 1236, respectively. In one embodiment, the first antigen binding domain that specifically binds CD8, comprises: (i) a VH comprising a VH CDR1, a VH CDR2, and a VH CDR3 having an amino acid sequence of SEQ ID NOs:1237, 1238, and 1239, respectively, and (ii) a VL comprising a VL CDR1, VL CDR2, and VL CDR3 having an amino acid sequence of SEQ ID NOs:1240, 1241, and 1242, respectively. In one embodiment, the first antigen binding domain that specifically binds CD8, comprises: (i) a VH comprising a VH CDR1, a VH CDR2, and a VH CDR3 having an amino acid sequence of SEQ ID NOs:1243, 1244, and 1245, respectively, and (ii) a VL comprising a VL CDR1, VL CDR2, and VL CDR3 having an amino acid sequence of SEQ ID NOs:1246, 1247, and 1248, respectively. In one embodiment, the first antigen binding domain that specifically binds CD8, comprises: (i) a VH comprising a VH CDR1, a VH CDR2, and a VH CDR3 having an amino acid sequence of SEQ ID NOs:1249, 1250, and 1251, respectively, and (ii) a VL comprising a VL CDR1, VL CDR2, and VL CDR3 having an amino acid sequence of SEQ ID NOs:1252, 1253, and 1254, respectively. In one embodiment, the first antigen binding domain that specifically binds CD8, comprises: (i) a VH comprising a VH CDR1, a VH CDR2, and a VH CDR3 having an amino acid sequence of a VH CDR1, a VH CDR2, and a VH CDR3, respectively, of a VH having an amino acid sequence of SEQ ID NO:1255; and (ii) a VL comprising a VL CDR1, a VL CDR2, and a VL CDR3 having an amino acid sequence of a VL CDR1, a VL CDR2, and a VL CDR3, respectively, of a VL having an amino acid sequence of SEQ ID NO:1256. In one embodiment, the first antigen binding domain that specifically binds CD8, comprises a VH having an amino acid sequence of SEQ ID NO:1255. In one embodiment, the first antigen binding domain that specifically binds CD8, comprises a VL having an amino acid sequence of SEQ ID NO:1256. In one embodiment, the first antigen binding domain that specifically binds CD8, comprises a VH having an amino acid sequence of SEQ ID NO:1255, and a VL having an amino acid sequence of SEQ ID NO:1256. In one embodiment, the first antigen binding domain that specifically binds CD8, comprises a heavy chain having an amino acid sequence of SEQ ID NO:1257. In one embodiment, the first antigen binding domain that specifically binds CD8, comprises a light chain having an amino acid sequence of SEQ ID NO:1258. In one embodiment, the first antigen binding domain that specifically binds CD8, comprises a heavy chain having an amino acid sequence of SEQ ID NO:1257, and a light chain having an amino acid sequence of SEQ ID NO:1258. In one embodiment, the first antigen binding domain that specifically binds CD8, comprises a VH having an amino acid sequence having at least 95% identity to an amino acid sequence of SEQ ID NO:1255. In one embodiment, the first antigen binding domain that specifically binds CD8, comprises a VL having an amino acid sequence having at least 95% identity to an amino acid sequence of SEQ ID NO:1256. In one embodiment, the first antigen binding domain that specifically binds CD8, comprises a VH having an amino acid sequence having at least 95% identity to an amino acid sequence of SEQ ID NO:1255, and a VL having an amino acid sequence having at least 95% identity to an amino acid sequence of SEQ ID NO:1256. In one embodiment, the first antigen binding domain that specifically binds CD8, comprises a heavy chain having an amino acid sequence having at least 95% identity to an amino acid sequence of SEQ ID NO:1257. In one embodiment, the first antigen binding domain that specifically binds CD8, comprises a light chain having an amino acid sequence having at least 95% identity to an amino acid sequence of SEQ ID NO:1258. In one embodiment, the first antigen binding domain that specifically binds CD8, comprises a heavy chain having an amino acid sequence having at least 95% identity to an amino acid sequence of SEQ ID NO:1257, and a light chain having an amino acid sequence having at least 95% identity to an amino acid sequence of SEQ ID NO:1258.

[0226] In one embodiment, the first antigen binding domain that specifically binds CD8, comprises: (i) a VH comprising a VH CDR1, a VH CDR2, and a VH CDR3 having an amino acid sequence of SEQ ID NOs:1259, 1260, and 1261, respectively, and (ii) a VL comprising a VL CDR1, VL CDR2, and VL CDR3 having an amino acid sequence of SEQ ID NOs:1262, 1263, and 1264, respectively. In one embodiment, the first antigen binding domain that specifically binds CD8, comprises: (i) a VH comprising a VH CDR1, a VH CDR2, and a VH CDR3 having an amino acid sequence of SEQ ID NOs:1265, 1266, and 1267, respectively, and (ii) a VL comprising a VL CDR1, VL CDR2, and VL CDR3 having an amino acid sequence of SEQ ID NOs:1268, 1269, and 1270, respectively. In one embodiment, the first antigen binding domain that specifically binds CD8, comprises: (i) a VH comprising a VH CDR1, a VH CDR2, and a VH CDR3 having an amino acid sequence of SEQ ID NOs:1271, 1272, and 1273, respectively, and (ii) a VL comprising a VL CDR1, VL CDR2, and VL CDR3 having an amino acid sequence of SEQ ID NOs:1274, 1275, and 1276, respectively. In one embodiment, the first antigen binding domain that specifically binds CD8, comprises: (i) a VH comprising a VH CDR1, a VH CDR2, and a VH CDR3 having an amino acid sequence of SEQ ID NOs:1277, 1278, and 1279, respectively, and (ii) a VL comprising a VL CDR1, VL CDR2, and VL CDR3 having an amino acid sequence of SEQ ID NOs:1280, 1281, and 1282, respectively. In one embodiment, the first antigen binding domain that specifically binds CD8, comprises: (i) a VH comprising a VH CDR1, a VH CDR2, and a VH CDR3 having an amino acid sequence of SEQ ID NOs:1283, 1284, and 1285, respectively, and (ii) a VL comprising a VL CDR1, VL CDR2, and VL CDR3 having an amino acid sequence of SEQ ID NOs:1286, 1287, and 1288, respectively. In one embodiment, the first antigen binding domain that specifically binds CD8, comprises: (i) a VH comprising a VH CDR1, a VH CDR2, and a VH CDR3 having an amino acid sequence of a VH CDR1, a VH CDR2, and a VH CDR3, respectively, of a VH having an amino acid sequence of SEQ ID NO:1289; and (ii) a VL comprising a VL CDR1, a VL CDR2, and a VL CDR3 having an amino acid sequence of a VL CDR1, a VL CDR2, and a VL CDR3, respectively, of a VL having an amino acid sequence of SEQ ID NO:1290. In one embodiment, the first antigen binding domain that specifically binds CD8, comprises a VH having an amino acid sequence of SEQ ID NO:1289. In one embodiment, the first antigen binding domain that specifically binds CD8, comprises a VL having an amino acid sequence of SEQ ID NO:1290. In one embodiment, the first antigen binding domain that specifically binds CD8, comprises a VH having an amino acid sequence of SEQ ID NO:1289, and a VL having an amino acid sequence of SEQ ID NO:1290. In one embodiment, the first antigen binding domain that specifically binds CD8, comprises a heavy chain having an amino acid sequence of SEQ ID NO:1291. In one embodiment, the first antigen binding domain that specifically binds CD8, comprises a light chain having an amino acid sequence of SEQ ID NO:1292. In one embodiment, the first antigen binding domain that specifically binds CD8, comprises a heavy chain having an amino acid sequence of SEQ ID NO:1291, and a light chain having an amino acid sequence of SEQ ID NO:1292. In one embodiment, the first antigen binding domain that specifically binds CD8, comprises a VH having an amino acid sequence having at least 95% identity to an amino acid sequence of SEQ ID NO:1289. In one embodiment, the first antigen binding domain that specifically binds CD8, comprises a VL having an amino acid sequence having at least 95% identity to an amino acid sequence of SEQ ID NO:1290. In one embodiment, the first antigen binding domain that specifically binds CD8, comprises a VH having an amino acid sequence having at least 95% identity to an amino acid sequence of SEQ ID NO:1289, and a VL having an amino acid sequence having at least 95% identity to an amino acid sequence of SEQ ID NO:1290. In one embodiment, the first antigen binding domain that specifically binds CD8, comprises a heavy chain having an amino acid sequence having at least 95% identity to an amino acid sequence of SEQ ID NO:1291. In one embodiment, the first antigen binding domain that specifically binds CD8, comprises a light chain having an amino acid sequence having at least 95% identity to an amino acid sequence of SEQ ID NO:1292. In one embodiment, the first antigen binding domain that specifically binds CD8, comprises a heavy chain having an amino acid sequence having at least 95% identity to an amino acid sequence of SEQ ID NO:1291, and a light chain having an amino acid sequence having at least 95% identity to an amino acid sequence of SEQ ID NO:1292.

[0227] In one embodiment, the first antigen binding domain that specifically binds CD8, comprises: (i) a VH comprising a VH CDR1, a VH CDR2, and a VH CDR3 having an amino acid sequence of SEQ ID NOs:1293, 1294, and 1295, respectively, and (ii) a VL comprising a VL CDR1, VL CDR2, and VL CDR3 having an amino acid sequence of SEQ ID NOs:1296, 1297, and 1298, respectively. In one embodiment, the first antigen binding domain that specifically binds CD8, comprises: (i) a VH comprising a VH CDR1, a VH CDR2, and a VH CDR3 having an amino acid sequence of SEQ ID NOs:1299, 1300, and 1301, respectively, and (ii) a VL comprising a VL CDR1, VL CDR2, and VL CDR3 having an amino acid sequence of SEQ ID NOs:1302, 1303, and 1304, respectively. In one embodiment, the first antigen binding domain that specifically binds CD8, comprises: (i) a VH comprising a VH CDR1, a VH CDR2, and a VH CDR3 having an amino acid sequence of SEQ ID NOs:1305, 1306, and 1307, respectively, and (ii) a VL comprising a VL CDR1, VL CDR2, and VL CDR3 having an amino acid sequence of SEQ ID NOs:1308, 1309, and 1310, respectively. In one embodiment, the first antigen binding domain that specifically binds CD8, comprises: (i) a VH comprising a VH CDR1, a VH CDR2, and a VH CDR3 having an amino acid sequence of SEQ ID NOs:1311, 1312, and 1313, respectively, and (ii) a VL comprising a VL CDR1, VL CDR2, and VL CDR3 having an amino acid sequence of SEQ ID NOs:1314, 1315, and 1316, respectively. In one embodiment, the first antigen binding domain that specifically binds CD8, comprises: (i) a VH comprising a VH CDR1, a VH CDR2, and a VH CDR3 having an amino acid sequence of SEQ ID NOs:1317, 1318, and 1319, respectively, and (ii) a VL comprising a VL CDR1, VL CDR2, and VL CDR3 having an amino acid sequence of SEQ ID NOs:1320, 1321, and 1322, respectively. In one embodiment, the first antigen binding domain that specifically binds CD8, comprises: (i) a VH comprising a VH CDR1, a VH CDR2, and a VH CDR3 having an amino acid sequence of a VH CDR1, a VH CDR2, and a VH CDR3, respectively, of a VH having an amino acid sequence of SEQ ID NO:1323; and (ii) a VL comprising a VL CDR1, a VL CDR2, and a VL CDR3 having an amino acid sequence of a VL CDR1, a VL CDR2, and a VL CDR3, respectively, of a VL having an amino acid sequence of SEQ ID NO:1324. In one embodiment, the first antigen binding domain that specifically binds CD8, comprises a VH having an amino acid sequence of SEQ ID NO:1323. In one embodiment, the first antigen binding domain that specifically binds CD8, comprises a VL having an amino acid sequence of SEQ ID NO:1324. In one embodiment, the first antigen binding domain that specifically binds CD8, comprises a VH having an amino acid sequence of SEQ ID NO:1323, and a VL having an amino acid sequence of SEQ ID NO:1324. In one embodiment, the first antigen binding domain that specifically binds CD8, comprises a heavy chain having an amino acid sequence of SEQ ID NO:1325. In one embodiment, the first antigen binding domain that specifically binds CD8, comprises a light chain having an amino acid sequence of SEQ ID NO:1326. In one embodiment, the first antigen binding domain that specifically binds CD8, comprises a heavy chain having an amino acid sequence of SEQ ID NO:1325, and a light chain having an amino acid sequence of SEQ ID NO:1326. In one embodiment, the first antigen binding domain that specifically binds CD8, comprises a VH having an amino acid sequence having at least 95% identity to an amino acid sequence of SEQ ID NO:1323. In one embodiment, the first antigen binding domain that specifically binds CD8, comprises a VL having an amino acid sequence having at least 95% identity to an amino acid sequence of SEQ ID NO:1324. In one embodiment, the first antigen binding domain that specifically binds CD8, comprises a VH having an amino acid sequence having at least 95% identity to an amino acid sequence of SEQ ID NO:1323, and a VL having an amino acid sequence having at least 95% identity to an amino acid sequence of SEQ ID NO:1324. In one embodiment, the first antigen binding domain that specifically binds CD8, comprises a heavy chain having an amino acid sequence having at least 95% identity to an amino acid sequence of SEQ ID NO:1325. In one embodiment, the first antigen binding domain that specifically binds CD8, comprises a light chain having an amino acid sequence having at least 95% identity to an amino acid sequence of SEQ ID NO:1326. In one embodiment, the first antigen binding domain that specifically binds CD8, comprises a heavy chain having an amino acid sequence having at least 95% identity to an amino acid sequence of SEQ ID NO:1325, and a light chain having an amino acid sequence having at least 95% identity to an amino acid sequence of SEQ ID NO:1326.

[0228] In one embodiment, the first antigen binding domain that specifically binds CD8, comprises: (i) a VH comprising a VH CDR1, a VH CDR2, and a VH CDR3 having an amino acid sequence of SEQ ID NOs:1327, 1328, and 1329, respectively, and (ii) a VL comprising a VL CDR1, VL CDR2, and VL CDR3 having an amino acid sequence of SEQ ID NOs:1330, 1331, and 1332, respectively. In one embodiment, the first antigen binding domain that specifically binds CD8, comprises: (i) a VH comprising a VH CDR1, a VH CDR2, and a VH CDR3 having an amino acid sequence of SEQ ID NOs:1333, 1334, and 1335, respectively, and (ii) a VL comprising a VL CDR1, VL CDR2, and VL CDR3 having an amino acid sequence of SEQ ID NOs:1336, 1337, and 1338, respectively. In one embodiment, the first antigen binding domain that specifically binds CD8, comprises: (i) a VH comprising a VH CDR1, a VH CDR2, and a VH CDR3 having an amino acid sequence of SEQ ID NOs:1339, 1340, and 1341, respectively, and (ii) a VL comprising a VL CDR1, VL CDR2, and VL CDR3 having an amino acid sequence of SEQ ID NOs:1342, 1343, and 1344, respectively. In one embodiment, the first antigen binding domain that specifically binds CD8, comprises: (i) a VH comprising a VH CDR1, a VH CDR2, and a VH CDR3 having an amino acid sequence of SEQ ID NOs:1345, 1346, and 1347, respectively, and (ii) a VL comprising a VL CDR1, VL CDR2, and VL CDR3 having an amino acid sequence of SEQ ID NOs:1348, 1349, and 1350, respectively. In one embodiment, the first antigen binding domain that specifically binds CD8, comprises: (i) a VH comprising a VH CDR1, a VH CDR2, and a VH CDR3 having an amino acid sequence of SEQ ID NOs:1351, 1352, and 1353, respectively, and (ii) a VL comprising a VL CDR1, VL CDR2, and VL CDR3 having an amino acid sequence of SEQ ID NOs:1354, 1355, and 1356, respectively. In one embodiment, the first antigen binding domain that specifically binds CD8, comprises: (i) a VH comprising a VH CDR1, a VH CDR2, and a VH CDR3 having an amino acid sequence of a VH CDR1, a VH CDR2, and a VH CDR3, respectively, of a VH having an amino acid sequence of SEQ ID NO:1357; and (ii) a VL comprising a VL CDR1, a VL CDR2, and a VL CDR3 having an amino acid sequence of a VL CDR1, a VL CDR2, and a VL CDR3, respectively, of a VL having an amino acid sequence of SEQ ID NO:1358. In one embodiment, the first antigen binding domain that specifically binds CD8, comprises a VH having an amino acid sequence of SEQ ID NO:1357. In one embodiment, the first antigen binding domain that specifically binds CD8, comprises a VL having an amino acid sequence of SEQ ID NO:1358. In one embodiment, the first antigen binding domain that specifically binds CD8, comprises a VH having an amino acid sequence of SEQ ID NO:1357, and a VL having an amino acid sequence of SEQ ID NO:1358. In one embodiment, the first antigen binding domain that specifically binds CD8, comprises a heavy chain having an amino acid sequence of SEQ ID NO:1359. In one embodiment, the first antigen binding domain that specifically binds CD8, comprises a light chain having an amino acid sequence of SEQ ID NO:1360. In one embodiment, the first antigen binding domain that specifically binds CD8, comprises a heavy chain having an amino acid sequence of SEQ ID NO:1359, and a light chain having an amino acid sequence of SEQ ID NO:1360. In one embodiment, the first antigen binding domain that specifically binds CD8, comprises a VH having an amino acid sequence having at least 95% identity to an amino acid sequence of SEQ ID NO:1357. In one embodiment, the first antigen binding domain that specifically binds CD8, comprises a VL having an amino acid sequence having at least 95% identity to an amino acid sequence of SEQ ID NO:1358. In one embodiment, the first antigen binding domain that specifically binds CD8, comprises a VH having an amino acid sequence having at least 95% identity to an amino acid sequence of SEQ ID NO:1357, and a VL having an amino acid sequence having at least 95% identity to an amino acid sequence of SEQ ID NO:1358. In one embodiment, the first antigen binding domain that specifically binds CD8, comprises a heavy chain having an amino acid sequence having at least 95% identity to an amino acid sequence of SEQ ID NO:1359. In one embodiment, the first antigen binding domain that specifically binds CD8, comprises a light chain having an amino acid sequence having at least 95% identity to an amino acid sequence of SEQ ID NO:1360. In one embodiment, the first antigen binding domain that specifically binds CD8, comprises a heavy chain having an amino acid sequence having at least 95% identity to an amino acid sequence of SEQ ID NO:1359, and a light chain having an amino acid sequence having at least 95% identity to an amino acid sequence of SEQ ID NO:1360.

[0229] In one embodiment, the first antigen binding domain that specifically binds CD8, comprises: (i) a VH comprising a VH CDR1, a VH CDR2, and a VH CDR3 having an amino acid sequence of SEQ ID NOs:1361, 1362, and 1363, respectively, and (ii) a VL comprising a VL CDR1, VL CDR2, and VL CDR3 having an amino acid sequence of SEQ ID NOs:1364, 1365, and 1366, respectively. In one embodiment, the first antigen binding domain that specifically binds CD8, comprises: (i) a VH comprising a VH CDR1, a VH CDR2, and a VH CDR3 having an amino acid sequence of SEQ ID NOs:1367, 1368, and 1369, respectively, and (ii) a VL comprising a VL CDR1, VL CDR2, and VL CDR3 having an amino acid sequence of SEQ ID NOs:1370, 1371, and 1372, respectively. In one embodiment, the first antigen binding domain that specifically binds CD8, comprises: (i) a VH comprising a VH CDR1, a VH CDR2, and a VH CDR3 having an amino acid sequence of SEQ ID NOs:1373, 1374, and 1375, respectively, and (ii) a VL comprising a VL CDR1, VL CDR2, and VL CDR3 having an amino acid sequence of SEQ ID NOs:1376, 1377, and 1378, respectively. In one embodiment, the first antigen binding domain that specifically binds CD8, comprises: (i) a VH comprising a VH CDR1, a VH CDR2, and a VH CDR3 having an amino acid sequence of SEQ ID NOs:1379, 1380, and 1381, respectively, and (ii) a VL comprising a VL CDR1, VL CDR2, and VL CDR3 having an amino acid sequence of SEQ ID NOs:1382, 1383, and 1384, respectively. In one embodiment, the first antigen binding domain that specifically binds CD8, comprises: (i) a VH comprising a VH CDR1, a VH CDR2, and a VH CDR3 having an amino acid sequence of SEQ ID NOs:1385, 1386, and 1387, respectively, and (ii) a VL comprising a VL CDR1, VL CDR2, and VL CDR3 having an amino acid sequence of SEQ ID NOs:1388, 1389, and 1390, respectively. In one embodiment, the first antigen binding domain that specifically binds CD8, comprises: (i) a VH comprising a VH CDR1, a VH CDR2, and a VH CDR3 having an amino acid sequence of a VH CDR1, a VH CDR2, and a VH CDR3, respectively, of a VH having an amino acid sequence of SEQ ID NO:1391; and (ii) a VL comprising a VL CDR1, a VL CDR2, and a VL CDR3 having an amino acid sequence of a VL CDR1, a VL CDR2, and a VL CDR3, respectively, of a VL having an amino acid sequence of SEQ ID NO:1392. In one embodiment, the first antigen binding domain that specifically binds CD8, comprises a VH having an amino acid sequence of SEQ ID NO:1391. In one embodiment, the first antigen binding domain that specifically binds CD8, comprises a VL having an amino acid sequence of SEQ ID NO:1392. In one embodiment, the first antigen binding domain that specifically binds CD8, comprises a VH having an amino acid sequence of SEQ ID NO:1391, and a VL having an amino acid sequence of SEQ ID NO:1392. In one embodiment, the first antigen binding domain that specifically binds CD8, comprises a heavy chain having an amino acid sequence of SEQ ID NO:1393. In one embodiment, the first antigen binding domain that specifically binds CD8, comprises a light chain having an amino acid sequence of SEQ ID NO:1394. In one embodiment, the first antigen binding domain that specifically binds CD8, comprises a heavy chain having an amino acid sequence of SEQ ID NO:1393, and a light chain having an amino acid sequence of SEQ ID NO:1394. In one embodiment, the first antigen binding domain that specifically binds CD8, comprises a VH having an amino acid sequence having at least 95% identity to an amino acid sequence of SEQ ID NO:1391. In one embodiment, the first antigen binding domain that specifically binds CD8, comprises a VL having an amino acid sequence having at least 95% identity to an amino acid sequence of SEQ ID NO:1392. In one embodiment, the first antigen binding domain that specifically binds CD8, comprises a VH having an amino acid sequence having at least 95% identity to an amino acid sequence of SEQ ID NO:1391, and a VL having an amino acid sequence having at least 95% identity to an amino acid sequence of SEQ ID NO:1392. In one embodiment, the first antigen binding domain that specifically binds CD8, comprises a heavy chain having an amino acid sequence having at least 95% identity to an amino acid sequence of SEQ ID NO:1393. In one embodiment, the first antigen binding domain that specifically binds CD8, comprises a light chain having an amino acid sequence having at least 95% identity to an amino acid sequence of SEQ ID NO:1394. In one embodiment, the first antigen binding domain that specifically binds CD8, comprises a heavy chain having an amino acid sequence having at least 95% identity to an amino acid sequence of SEQ ID NO:1393, and a light chain having an amino acid sequence having at least 95% identity to an amino acid sequence of SEQ ID NO:1394.

[0230] In one embodiment, the first antigen binding domain that specifically binds CD8, comprises: (i) a VH comprising a VH CDR1, a VH CDR2, and a VH CDR3 having an amino acid sequence of SEQ ID NOs:1395, 1396, and 1397, respectively, and (ii) a VL comprising a VL CDR1, VL CDR2, and VL CDR3 having an amino acid sequence of SEQ ID NOs:1398, 1399, and 1400, respectively. In one embodiment, the first antigen binding domain that specifically binds CD8, comprises: (i) a VH comprising a VH CDR1, a VH CDR2, and a VH CDR3 having an amino acid sequence of SEQ ID NOs:1401, 1402, and 1403, respectively, and (ii) a VL comprising a VL CDR1, VL CDR2, and VL CDR3 having an amino acid sequence of SEQ ID NOs:1404, 1405, and 1406, respectively. In one embodiment, the first antigen binding domain that specifically binds CD8, comprises: (i) a VH comprising a VH CDR1, a VH CDR2, and a VH CDR3 having an amino acid sequence of SEQ ID NOs:1407, 1408, and 1409, respectively, and (ii) a VL comprising a VL CDR1, VL CDR2, and VL CDR3 having an amino acid sequence of SEQ ID NOs:1410, 1411, and 1412, respectively. In one embodiment, the first antigen binding domain that specifically binds CD8, comprises: (i) a VH comprising a VH CDR1, a VH CDR2, and a VH CDR3 having an amino acid sequence of SEQ ID NOs:1413, 1414, and 1415, respectively, and (ii) a VL comprising a VL CDR1, VL CDR2, and VL CDR3 having an amino acid sequence of SEQ ID NOs:1416, 1417, and 1418, respectively. In one embodiment, the first antigen binding domain that specifically binds CD8, comprises: (i) a VH comprising a VH CDR1, a VH CDR2, and a VH CDR3 having an amino acid sequence of SEQ ID NOs:1419, 1420, and 1421, respectively, and (ii) a VL comprising a VL CDR1, VL CDR2, and VL CDR3 having an amino acid sequence of SEQ ID NOs:1422, 1423, and 1424, respectively. In one embodiment, the first antigen binding domain that specifically binds CD8, comprises: (i) a VH comprising a VH CDR1, a VH CDR2, and a VH CDR3 having an amino acid sequence of a VH CDR1, a VH CDR2, and a VH CDR3, respectively, of a VH having an amino acid sequence of SEQ ID NO:1425; and (ii) a VL comprising a VL CDR1, a VL CDR2, and a VL CDR3 having an amino acid sequence of a VL CDR1, a VL CDR2, and a VL CDR3, respectively, of a VL having an amino acid sequence of SEQ ID NO:1426. In one embodiment, the first antigen binding domain that specifically binds CD8, comprises a VH having an amino acid sequence of SEQ ID NO:1425. In one embodiment, the first antigen binding domain that specifically binds CD8, comprises a VL having an amino acid sequence of SEQ ID NO:1426. In one embodiment, the first antigen binding domain that specifically binds CD8, comprises a VH having an amino acid sequence of SEQ ID NO:1425, and a VL having an amino acid sequence of SEQ ID NO:1426. In one embodiment, the first antigen binding domain that specifically binds CD8, comprises a heavy chain having an amino acid sequence of SEQ ID NO:1427. In one embodiment, the first antigen binding domain that specifically binds CD8, comprises a light chain having an amino acid sequence of SEQ ID NO:1428. In one embodiment, the first antigen binding domain that specifically binds CD8, comprises a heavy chain having an amino acid sequence of SEQ ID NO:1427, and a light chain having an amino acid sequence of SEQ ID NO:1428. In one embodiment, the first antigen binding domain that specifically binds CD8, comprises a VH having an amino acid sequence having at least 95% identity to an amino acid sequence of SEQ ID NO:1425. In one embodiment, the first antigen binding domain that specifically binds CD8, comprises a VL having an amino acid sequence having at least 95% identity to an amino acid sequence of SEQ ID NO:1426. In one embodiment, the first antigen binding domain that specifically binds CD8, comprises a VH having an amino acid sequence having at least 95% identity to an amino acid sequence of SEQ ID NO:1425, and a VL having an amino acid sequence having at least 95% identity to an amino acid sequence of SEQ ID NO:1426. In one embodiment, the first antigen binding domain that specifically binds CD8, comprises a heavy chain having an amino acid sequence having at least 95% identity to an amino acid sequence of SEQ ID NO:1427. In one embodiment, the first antigen binding domain that specifically binds CD8, comprises a light chain having an amino acid sequence having at least 95% identity to an amino acid sequence of SEQ ID NO:1428. In one embodiment, the first antigen binding domain that specifically binds CD8, comprises a heavy chain having an amino acid sequence having at least 95% identity to an amino acid sequence of SEQ ID NO:1427, and a light chain having an amino acid sequence having at least 95% identity to an amino acid sequence of SEQ ID NO:1428.

[0231] In one embodiment, the first antigen binding domain that specifically binds CD8, comprises: (i) a VH comprising a VH CDR1, a VH CDR2, and a VH CDR3 having an amino acid sequence of SEQ ID NOs:1429, 1430, and 1431, respectively, and (ii) a VL comprising a VL CDR1, VL CDR2, and VL CDR3 having an amino acid sequence of SEQ ID NOs:1432, 1433, and 1434, respectively. In one embodiment, the first antigen binding domain that specifically binds CD8, comprises: (i) a VH comprising a VH CDR1, a VH CDR2, and a VH CDR3 having an amino acid sequence of SEQ ID NOs:1435, 1436, and 1437, respectively, and (ii) a VL comprising a VL CDR1, VL CDR2, and VL CDR3 having an amino acid sequence of SEQ ID NOs:1438, 1439, and 1440, respectively. In one embodiment, the first antigen binding domain that specifically binds CD8, comprises: (i) a VH comprising a VH CDR1, a VH CDR2, and a VH CDR3 having an amino acid sequence of SEQ ID NOs:1441, 1442, and 1443, respectively, and (ii) a VL comprising a VL CDR1, VL CDR2, and VL CDR3 having an amino acid sequence of SEQ ID NOs:1444, 1445, and 1446, respectively. In one embodiment, the first antigen binding domain that specifically binds CD8, comprises: (i) a VH comprising a VH CDR1, a VH CDR2, and a VH CDR3 having an amino acid sequence of SEQ ID NOs:1447, 1448, and 1449, respectively, and (ii) a VL comprising a VL CDR1, VL CDR2, and VL CDR3 having an amino acid sequence of SEQ ID NOs:1450, 1451, and 1452, respectively. In one embodiment, the first antigen binding domain that specifically binds CD8, comprises: (i) a VH comprising a VH CDR1, a VH CDR2, and a VH CDR3 having an amino acid sequence of SEQ ID NOs:1453, 1454, and 1455, respectively, and (ii) a VL comprising a VL CDR1, VL CDR2, and VL CDR3 having an amino acid sequence of SEQ ID NOs:1456, 1457, and 1458, respectively. In one embodiment, the first antigen binding domain that specifically binds CD8, comprises: (i) a VH comprising a VH CDR1, a VH CDR2, and a VH CDR3 having an amino acid sequence of a VH CDR1, a VH CDR2, and a VH CDR3, respectively, of a VH having an amino acid sequence of SEQ ID NO:1459; and (ii) a VL comprising a VL CDR1, a VL CDR2, and a VL CDR3 having an amino acid sequence of a VL CDR1, a VL CDR2, and a VL CDR3, respectively, of a VL having an amino acid sequence of SEQ ID NO:1460. In one embodiment, the first antigen binding domain that specifically binds CD8, comprises a VH having an amino acid sequence of SEQ ID NO:1459. In one embodiment, the first antigen binding domain that specifically binds CD8, comprises a VL having an amino acid sequence of SEQ ID NO:1460. In one embodiment, the first antigen binding domain that specifically binds CD8, comprises a VH having an amino acid sequence of SEQ ID NO:1459, and a VL having an amino acid sequence of SEQ ID NO:1460. In one embodiment, the first antigen binding domain that specifically binds CD8, comprises a heavy chain having an amino acid sequence of SEQ ID NO:1461. In one embodiment, the first antigen binding domain that specifically binds CD8, comprises a light chain having an amino acid sequence of SEQ ID NO:1462. In one embodiment, the first antigen binding domain that specifically binds CD8, comprises a heavy chain having an amino acid sequence of SEQ ID NO:1461, and a light chain having an amino acid sequence of SEQ ID NO:1462. In one embodiment, the first antigen binding domain that specifically binds CD8, comprises a VH having an amino acid sequence having at least 95% identity to an amino acid sequence of SEQ ID NO:1459. In one embodiment, the first antigen binding domain that specifically binds CD8, comprises a VL having an amino acid sequence having at least 95% identity to an amino acid sequence of SEQ ID NO:1460. In one embodiment, the first antigen binding domain that specifically binds CD8, comprises a VH having an amino acid sequence having at least 95% identity to an amino acid sequence of SEQ ID NO:1459, and a VL having an amino acid sequence having at least 95% identity to an amino acid sequence of SEQ ID NO:1460. In one embodiment, the first antigen binding domain that specifically binds CD8, comprises a heavy chain having an amino acid sequence having at least 95% identity to an amino acid sequence of SEQ ID NO:1461. In one embodiment, the first antigen binding domain that specifically binds CD8, comprises a light chain having an amino acid sequence having at least 95% identity to an amino acid sequence of SEQ ID NO:1462. In one embodiment, the first antigen binding domain that specifically binds CD8, comprises a heavy chain having an amino acid sequence having at least 95% identity to an amino acid sequence of SEQ ID NO:1461, and a light chain having an amino acid sequence having at least 95% identity to an amino acid sequence of SEQ ID NO:1462.

[0232] In one embodiment, the first antigen binding domain that specifically binds CD8, comprises: (i) a VH comprising a VH CDR1, a VH CDR2, and a VH CDR3 having an amino acid sequence of SEQ ID NOs:1463, 1464, and 1465, respectively, and (ii) a VL comprising a VL CDR1, VL CDR2, and VL CDR3 having an amino acid sequence of SEQ ID NOs:1466, 1467, and 1468, respectively. In one embodiment, the first antigen binding domain that specifically binds CD8, comprises: (i) a VH comprising a VH CDR1, a VH CDR2, and a VH CDR3 having an amino acid sequence of SEQ ID NOs:1469, 1470, and 1471, respectively, and (ii) a VL comprising a VL CDR1, VL CDR2, and VL CDR3 having an amino acid sequence of SEQ ID NOs:1472, 1473, and 1474, respectively. In one embodiment, the first antigen binding domain that specifically binds CD8, comprises: (i) a VH comprising a VH CDR1, a VH CDR2, and a VH CDR3 having an amino acid sequence of SEQ ID NOs:1475, 1476, and 1477, respectively, and (ii) a VL comprising a VL CDR1, VL CDR2, and VL CDR3 having an amino acid sequence of SEQ ID NOs:1478, 1479, and 1480, respectively. In one embodiment, the first antigen binding domain that specifically binds CD8, comprises: (i) a VH comprising a VH CDR1, a VH CDR2, and a VH CDR3 having an amino acid sequence of SEQ ID NOs:1481, 1482, and 1483, respectively, and (ii) a VL comprising a VL CDR1, VL CDR2, and VL CDR3 having an amino acid sequence of SEQ ID NOs:1484, 1485, and 1486, respectively. In one embodiment, the first antigen binding domain that specifically binds CD8, comprises: (i) a VH comprising a VH CDR1, a VH CDR2, and a VH CDR3 having an amino acid sequence of SEQ ID NOs:1487, 1488, and 1489, respectively, and (ii) a VL comprising a VL CDR1, VL CDR2, and VL CDR3 having an amino acid sequence of SEQ ID NOs:1490, 1491, and 1492, respectively. In one embodiment, the first antigen binding domain that specifically binds CD8, comprises: (i) a VH comprising a VH CDR1, a VH CDR2, and a VH CDR3 having an amino acid sequence of a VH CDR1, a VH CDR2, and a VH CDR3, respectively, of a VH having an amino acid sequence of SEQ ID NO:1493; and (ii) a VL comprising a VL CDR1, a VL CDR2, and a VL CDR3 having an amino acid sequence of a VL CDR1, a VL CDR2, and a VL CDR3, respectively, of a VL having an amino acid sequence of SEQ ID NO:1494. In one embodiment, the first antigen binding domain that specifically binds CD8, comprises a VH having an amino acid sequence of SEQ ID NO:1493. In one embodiment, the first antigen binding domain that specifically binds CD8, comprises a VL having an amino acid sequence of SEQ ID NO:1494. In one embodiment, the first antigen binding domain that specifically binds CD8, comprises a VH having an amino acid sequence of SEQ ID NO:1493, and a VL having an amino acid sequence of SEQ ID NO:1494. In one embodiment, the first antigen binding domain that specifically binds CD8, comprises a heavy chain having an amino acid sequence of SEQ ID NO:1495. In one embodiment, the first antigen binding domain that specifically binds CD8, comprises a light chain having an amino acid sequence of SEQ ID NO:1496. In one embodiment, the first antigen binding domain that specifically binds CD8, comprises a heavy chain having an amino acid sequence of SEQ ID NO:1495, and a light chain having an amino acid sequence of SEQ ID NO:1496. In one embodiment, the first antigen binding domain that specifically binds CD8, comprises a VH having an amino acid sequence having at least 95% identity to an amino acid sequence of SEQ ID NO:1493. In one embodiment, the first antigen binding domain that specifically binds CD8, comprises a VL having an amino acid sequence having at least 95% identity to an amino acid sequence of SEQ ID NO:1494. In one embodiment, the first antigen binding domain that specifically binds CD8, comprises a VH having an amino acid sequence having at least 95% identity to an amino acid sequence of SEQ ID NO:1493, and a VL having an amino acid sequence having at least 95% identity to an amino acid sequence of SEQ ID NO:1494. In one embodiment, the first antigen binding domain that specifically binds CD8, comprises a heavy chain having an amino acid sequence having at least 95% identity to an amino acid sequence of SEQ ID NO:1495. In one embodiment, the first antigen binding domain that specifically binds CD8, comprises a light chain having an amino acid sequence having at least 95% identity to an amino acid sequence of SEQ ID NO:1496. In one embodiment, the first antigen binding domain that specifically binds CD8, comprises a heavy chain having an amino acid sequence having at least 95% identity to an amino acid sequence of SEQ ID NO:1495, and a light chain having an amino acid sequence having at least 95% identity to an amino acid sequence of SEQ ID NO:1496.

[0233] In one embodiment, the first antigen binding domain that specifically binds CD8, comprises: (i) a VH comprising a VH CDR1, a VH CDR2, and a VH CDR3 having an amino acid sequence of SEQ ID NOs:1497, 1498, and 1499, respectively, and (ii) a VL comprising a VL CDR1, VL CDR2, and VL CDR3 having an amino acid sequence of SEQ ID NOs:1500, 1501, and 1502, respectively. In one embodiment, the first antigen binding domain that specifically binds CD8, comprises: (i) a VH comprising a VH CDR1, a VH CDR2, and a VH CDR3 having an amino acid sequence of SEQ ID NOs:1503, 1504, and 1505, respectively, and (ii) a VL comprising a VL CDR1, VL CDR2, and VL CDR3 having an amino acid sequence of SEQ ID NOs:1506, 1507, and 1508, respectively. In one embodiment, the first antigen binding domain that specifically binds CD8, comprises: (i) a VH comprising a VH CDR1, a VH CDR2, and a VH CDR3 having an amino acid sequence of SEQ ID NOs:1509, 1510, and 1511, respectively, and (ii) a VL comprising a VL CDR1, VL CDR2, and VL CDR3 having an amino acid sequence of SEQ ID NOs:1512, 1513, and 1514, respectively. In one embodiment, the first antigen binding domain that specifically binds CD8, comprises: (i) a VH comprising a VH CDR1, a VH CDR2, and a VH CDR3 having an amino acid sequence of SEQ ID NOs:1515, 1516, and 1517, respectively, and (ii) a VL comprising a VL CDR1, VL CDR2, and VL CDR3 having an amino acid sequence of SEQ ID NOs:1518, 1519, and 1520, respectively. In one embodiment, the first antigen binding domain that specifically binds CD8, comprises: (i) a VH comprising a VH CDR1, a VH CDR2, and a VH CDR3 having an amino acid sequence of SEQ ID NOs:1521, 1522, and 1523, respectively, and (ii) a VL comprising a VL CDR1, VL CDR2, and VL CDR3 having an amino acid sequence of SEQ ID NOs:1524, 1525, and 1526, respectively. In one embodiment, the first antigen binding domain that specifically binds CD8, comprises: (i) a VH comprising a VH CDR1, a VH CDR2, and a VH CDR3 having an amino acid sequence of a VH CDR1, a VH CDR2, and a VH CDR3, respectively, of a VH having an amino acid sequence of SEQ ID NO:1527; and (ii) a VL comprising a VL CDR1, a VL CDR2, and a VL CDR3 having an amino acid sequence of a VL CDR1, a VL CDR2, and a VL CDR3, respectively, of a VL having an amino acid sequence of SEQ ID NO:1528. In one embodiment, the first antigen binding domain that specifically binds CD8, comprises a VH having an amino acid sequence of SEQ ID NO:1527. In one embodiment, the first antigen binding domain that specifically binds CD8, comprises a VL having an amino acid sequence of SEQ ID NO:1528. In one embodiment, the first antigen binding domain that specifically binds CD8, comprises a VH having an amino acid sequence of SEQ ID NO:1527, and a VL having an amino acid sequence of SEQ ID NO:1528. In one embodiment, the first antigen binding domain that specifically binds CD8, comprises a heavy chain having an amino acid sequence of SEQ ID NO:1529. In one embodiment, the first antigen binding domain that specifically binds CD8, comprises a light chain having an amino acid sequence of SEQ ID NO:1530. In one embodiment, the first antigen binding domain that specifically binds CD8, comprises a heavy chain having an amino acid sequence of SEQ ID NO:1529, and a light chain having an amino acid sequence of SEQ ID NO:1530. In one embodiment, the first antigen binding domain that specifically binds CD8, comprises a VH having an amino acid sequence having at least 95% identity to an amino acid sequence of SEQ ID NO:1527. In one embodiment, the first antigen binding domain that specifically binds CD8, comprises a VL having an amino acid sequence having at least 95% identity to an amino acid sequence of SEQ ID NO:1528. In one embodiment, the first antigen binding domain that specifically binds CD8, comprises a VH having an amino acid sequence having at least 95% identity to an amino acid sequence of SEQ ID NO:1527, and a VL having an amino acid sequence having at least 95% identity to an amino acid sequence of SEQ ID NO:1528. In one embodiment, the first antigen binding domain that specifically binds CD8, comprises a heavy chain having an amino acid sequence having at least 95% identity to an amino acid sequence of SEQ ID NO:1529. In one embodiment, the first antigen binding domain that specifically binds CD8, comprises a light chain having an amino acid sequence having at least 95% identity to an amino acid sequence of SEQ ID NO:1530. In one embodiment, the first antigen binding domain that specifically binds CD8, comprises a heavy chain having an amino acid sequence having at least 95% identity to an amino acid sequence of SEQ ID NO:1529, and a light chain having an amino acid sequence having at least 95% identity to an amino acid sequence of SEQ ID NO:1530.

[0234] In one embodiment, the first antigen binding domain that specifically binds CD8, comprises: (i) a VH comprising a VH CDR1, a VH CDR2, and a VH CDR3 having an amino acid sequence of SEQ ID NOs:1531, 1532, and 1533, respectively, and (ii) a VL comprising a VL CDR1, VL CDR2, and VL CDR3 having an amino acid sequence of SEQ ID NOs:1534, 1535, and 1536, respectively. In one embodiment, the first antigen binding domain that specifically binds CD8, comprises: (i) a VH comprising a VH CDR1, a VH CDR2, and a VH CDR3 having an amino acid sequence of SEQ ID NOs:1537, 1538, and 1539, respectively, and (ii) a VL comprising a VL CDR1, VL CDR2, and VL CDR3 having an amino acid sequence of SEQ ID NOs:1540, 1541, and 1542, respectively. In one embodiment, the first antigen binding domain that specifically binds CD8, comprises: (i) a VH comprising a VH CDR1, a VH CDR2, and a VH CDR3 having an amino acid sequence of SEQ ID NOs:1543, 1544, and 1545, respectively, and (ii) a VL comprising a VL CDR1, VL CDR2, and VL CDR3 having an amino acid sequence of SEQ ID NOs:1546, 1547, and 1548, respectively. In one embodiment, the first antigen binding domain that specifically binds CD8, comprises: (i) a VH comprising a VH CDR1, a VH CDR2, and a VH CDR3 having an amino acid sequence of SEQ ID NOs:1549, 1550, and 1551, respectively, and (ii) a VL comprising a VL CDR1, VL CDR2, and VL CDR3 having an amino acid sequence of SEQ ID NOs:1552, 1553, and 1554, respectively. In one embodiment, the first antigen binding domain that specifically binds CD8, comprises: (i) a VH comprising a VH CDR1, a VH CDR2, and a VH CDR3 having an amino acid sequence of SEQ ID NOs:1555, 1556, and 1557, respectively, and (ii) a VL comprising a VL CDR1, VL CDR2, and VL CDR3 having an amino acid sequence of SEQ ID NOs:1558, 1559, and 1560, respectively. In one embodiment, the first antigen binding domain that specifically binds CD8, comprises: (i) a VH comprising a VH CDR1, a VH CDR2, and a VH CDR3 having an amino acid sequence of a VH CDR1, a VH CDR2, and a VH CDR3, respectively, of a VH having an amino acid sequence of SEQ ID NO:1561; and (ii) a VL comprising a VL CDR1, a VL CDR2, and a VL CDR3 having an amino acid sequence of a VL CDR1, a VL CDR2, and a VL CDR3, respectively, of a VL having an amino acid sequence of SEQ ID NO:1562. In one embodiment, the first antigen binding domain that specifically binds CD8, comprises a VH having an amino acid sequence of SEQ ID NO:1561. In one embodiment, the first antigen binding domain that specifically binds CD8, comprises a VL having an amino acid sequence of SEQ ID NO:1562. In one embodiment, the first antigen binding domain that specifically binds CD8, comprises a VH having an amino acid sequence of SEQ ID NO:1561, and a VL having an amino acid sequence of SEQ ID NO:1562. In one embodiment, the first antigen binding domain that specifically binds CD8, comprises a heavy chain having an amino acid sequence of SEQ ID NO:1563. In one embodiment, the first antigen binding domain that specifically binds CD8, comprises a light chain having an amino acid sequence of SEQ ID NO:1564. In one embodiment, the first antigen binding domain that specifically binds CD8, comprises a heavy chain having an amino acid sequence of SEQ ID NO:1563, and a light chain having an amino acid sequence of SEQ ID NO:1564. In one embodiment, the first antigen binding domain that specifically binds CD8, comprises a VH having an amino acid sequence having at least 95% identity to an amino acid sequence of SEQ ID NO:1561. In one embodiment, the first antigen binding domain that specifically binds CD8, comprises a VL having an amino acid sequence having at least 95% identity to an amino acid sequence of SEQ ID NO:1562. In one embodiment, the first antigen binding domain that specifically binds CD8, comprises a VH having an amino acid sequence having at least 95% identity to an amino acid sequence of SEQ ID NO:1561, and a VL having an amino acid sequence having at least 95% identity to an amino acid sequence of SEQ ID NO:1562. In one embodiment, the first antigen binding domain that specifically binds CD8, comprises a heavy chain having an amino acid sequence having at least 95% identity to an amino acid sequence of SEQ ID NO:1563. In one embodiment, the first antigen binding domain that specifically binds CD8, comprises a light chain having an amino acid sequence having at least 95% identity to an amino acid sequence of SEQ ID NO:1564. In one embodiment, the first antigen binding domain that specifically binds CD8, comprises a heavy chain having an amino acid sequence having at least 95% identity to an amino acid sequence of SEQ ID NO:1563, and a light chain having an amino acid sequence having at least 95% identity to an amino acid sequence of SEQ ID NO:1564.

[0235] In one embodiment, the first antigen binding domain that specifically binds CD8, comprises: (i) a VH comprising a VH CDR1, a VH CDR2, and a VH CDR3 having an amino acid sequence of SEQ ID NOs:1565, 1566, and 1567, respectively, and (ii) a VL comprising a VL CDR1, VL CDR2, and VL CDR3 having an amino acid sequence of SEQ ID NOs:1568, 1569, and 1570, respectively. In one embodiment, the first antigen binding domain that specifically binds CD8, comprises: (i) a VH comprising a VH CDR1, a VH CDR2, and a VH CDR3 having an amino acid sequence of SEQ ID NOs:1571, 1572, and 1573, respectively, and (ii) a VL comprising a VL CDR1, VL CDR2, and VL CDR3 having an amino acid sequence of SEQ ID NOs:1574, 1575, and 1576, respectively. In one embodiment, the first antigen binding domain that specifically binds CD8, comprises: (i) a VH comprising a VH CDR1, a VH CDR2, and a VH CDR3 having an amino acid sequence of SEQ ID NOs:1577, 1578, and 1579, respectively, and (ii) a VL comprising a VL CDR1, VL CDR2, and VL CDR3 having an amino acid sequence of SEQ ID NOs:1580, 1581, and 1582, respectively. In one embodiment, the first antigen binding domain that specifically binds CD8, comprises: (i) a VH comprising a VH CDR1, a VH CDR2, and a VH CDR3 having an amino acid sequence of SEQ ID NOs:1583, 1584, and 1585, respectively, and (ii) a VL comprising a VL CDR1, VL CDR2, and VL CDR3 having an amino acid sequence of SEQ ID NOs:1586, 1587, and 1588, respectively. In one embodiment, the first antigen binding domain that specifically binds CD8, comprises: (i) a VH comprising a VH CDR1, a VH CDR2, and a VH CDR3 having an amino acid sequence of SEQ ID NOs:1589, 1590, and 1591, respectively, and (ii) a VL comprising a VL CDR1, VL CDR2, and VL CDR3 having an amino acid sequence of SEQ ID NOs:1592, 1593, and 1594, respectively. In one embodiment, the first antigen binding domain that specifically binds CD8, comprises: (i) a VH comprising a VH CDR1, a VH CDR2, and a VH CDR3 having an amino acid sequence of a VH CDR1, a VH CDR2, and a VH CDR3, respectively, of a VH having an amino acid sequence of SEQ ID NO:1595; and (ii) a VL comprising a VL CDR1, a VL CDR2, and a VL CDR3 having an amino acid sequence of a VL CDR1, a VL CDR2, and a VL CDR3, respectively, of a VL having an amino acid sequence of SEQ ID NO:1596. In one embodiment, the first antigen binding domain that specifically binds CD8, comprises a VH having an amino acid sequence of SEQ ID NO:1595. In one embodiment, the first antigen binding domain that specifically binds CD8, comprises a VL having an amino acid sequence of SEQ ID NO:1596. In one embodiment, the first antigen binding domain that specifically binds CD8, comprises a VH having an amino acid sequence of SEQ ID NO:1595, and a VL having an amino acid sequence of SEQ ID NO:1596. In one embodiment, the first antigen binding domain that specifically binds CD8, comprises a heavy chain having an amino acid sequence of SEQ ID NO:1597. In one embodiment, the first antigen binding domain that specifically binds CD8, comprises a light chain having an amino acid sequence of SEQ ID NO:1598. In one embodiment, the first antigen binding domain that specifically binds CD8, comprises a heavy chain having an amino acid sequence of SEQ ID NO:1597, and a light chain having an amino acid sequence of SEQ ID NO:1598. In one embodiment, the first antigen binding domain that specifically binds CD8, comprises a VH having an amino acid sequence having at least 95% identity to an amino acid sequence of SEQ ID NO:1595. In one embodiment, the first antigen binding domain that specifically binds CD8, comprises a VL having an amino acid sequence having at least 95% identity to an amino acid sequence of SEQ ID NO:1596. In one embodiment, the first antigen binding domain that specifically binds CD8, comprises a VH having an amino acid sequence having at least 95% identity to an amino acid sequence of SEQ ID NO:1595, and a VL having an amino acid sequence having at least 95% identity to an amino acid sequence of SEQ ID NO:1596. In one embodiment, the first antigen binding domain that specifically binds CD8, comprises a heavy chain having an amino acid sequence having at least 95% identity to an amino acid sequence of SEQ ID NO:1597. In one embodiment, the first antigen binding domain that specifically binds CD8, comprises a light chain having an amino acid sequence having at least 95% identity to an amino acid sequence of SEQ ID NO:1598. In one embodiment, the first antigen binding domain that specifically binds CD8, comprises a heavy chain having an amino acid sequence having at least 95% identity to an amino acid sequence of SEQ ID NO:1597, and a light chain having an amino acid sequence having at least 95% identity to an amino acid sequence of SEQ ID NO:1598.

[0236] In one embodiment, the first antigen binding domain that specifically binds CD8, comprises: (i) a VH comprising a VH CDR1, a VH CDR2, and a VH CDR3 having an amino acid sequence of SEQ ID NOs:1599, 1600, and 1601, respectively, and (ii) a VL comprising a VL CDR1, VL CDR2, and VL CDR3 having an amino acid sequence of SEQ ID NOs:1602, 1603, and 1604, respectively. In one embodiment, the first antigen binding domain that specifically binds CD8, comprises: (i) a VH comprising a VH CDR1, a VH CDR2, and a VH CDR3 having an amino acid sequence of SEQ ID NOs:1605, 1606, and 1607, respectively, and (ii) a VL comprising a VL CDR1, VL CDR2, and VL CDR3 having an amino acid sequence of SEQ ID NOs:1608, 1609, and 1610, respectively. In one embodiment, the first antigen binding domain that specifically binds CD8, comprises: (i) a VH comprising a VH CDR1, a VH CDR2, and a VH CDR3 having an amino acid sequence of SEQ ID NOs:1611, 1612, and 1613, respectively, and (ii) a VL comprising a VL CDR1, VL CDR2, and VL CDR3 having an amino acid sequence of SEQ ID NOs:1614, 1615, and 1616, respectively. In one embodiment, the first antigen binding domain that specifically binds CD8, comprises: (i) a VH comprising a VH CDR1, a VH CDR2, and a VH CDR3 having an amino acid sequence of SEQ ID NOs:1617, 1618, and 1619, respectively, and (ii) a VL comprising a VL CDR1, VL CDR2, and VL CDR3 having an amino acid sequence of SEQ ID NOs:1620, 1621, and 1622, respectively. In one embodiment, the first antigen binding domain that specifically binds CD8, comprises: (i) a VH comprising a VH CDR1, a VH CDR2, and a VH CDR3 having an amino acid sequence of SEQ ID NOs:1623, 1624, and 1625, respectively, and (ii) a VL comprising a VL CDR1, VL CDR2, and VL CDR3 having an amino acid sequence of SEQ ID NOs:1626, 1627, and 1628, respectively. In one embodiment, the first antigen binding domain that specifically binds CD8, comprises: (i) a VH comprising a VH CDR1, a VH CDR2, and a VH CDR3 having an amino acid sequence of a VH CDR1, a VH CDR2, and a VH CDR3, respectively, of a VH having an amino acid sequence of SEQ ID NO:1629; and (ii) a VL comprising a VL CDR1, a VL CDR2, and a VL CDR3 having an amino acid sequence of a VL CDR1, a VL CDR2, and a VL CDR3, respectively, of a VL having an amino acid sequence of SEQ ID NO:1630. In one embodiment, the first antigen binding domain that specifically binds CD8, comprises a VH having an amino acid sequence of SEQ ID NO:1629. In one embodiment, the first antigen binding domain that specifically binds CD8, comprises a VL having an amino acid sequence of SEQ ID NO:1630. In one embodiment, the first antigen binding domain that specifically binds CD8, comprises a VH having an amino acid sequence of SEQ ID NO:1629, and a VL having an amino acid sequence of SEQ ID NO:1630. In one embodiment, the first antigen binding domain that specifically binds CD8, comprises a heavy chain having an amino acid sequence of SEQ ID NO:1631. In one embodiment, the first antigen binding domain that specifically binds CD8, comprises a light chain having an amino acid sequence of SEQ ID NO:1632. In one embodiment, the first antigen binding domain that specifically binds CD8, comprises a heavy chain having an amino acid sequence of SEQ ID NO:1631, and a light chain having an amino acid sequence of SEQ ID NO:1632. In one embodiment, the first antigen binding domain that specifically binds CD8, comprises a VH having an amino acid sequence having at least 95% identity to an amino acid sequence of SEQ ID NO:1629. In one embodiment, the first antigen binding domain that specifically binds CD8, comprises a VL having an amino acid sequence having at least 95% identity to an amino acid sequence of SEQ ID NO:1630. In one embodiment, the first antigen binding domain that specifically binds CD8, comprises a VH having an amino acid sequence having at least 95% identity to an amino acid sequence of SEQ ID NO:1629, and a VL having an amino acid sequence having at least 95% identity to an amino acid sequence of SEQ ID NO:1630. In one embodiment, the first antigen binding domain that specifically binds CD8, comprises a heavy chain having an amino acid sequence having at least 95% identity to an amino acid sequence of SEQ ID NO:1631. In one embodiment, the first antigen binding domain that specifically binds CD8, comprises a light chain having an amino acid sequence having at least 95% identity to an amino acid sequence of SEQ ID NO:1632. In one embodiment, the first antigen binding domain that specifically binds CD8, comprises a heavy chain having an amino acid sequence having at least 95% identity to an amino acid sequence of SEQ ID NO:1631, and a light chain having an amino acid sequence having at least 95% identity to an amino acid sequence of SEQ ID NO:1632.

[0237] In one embodiment, the first antigen binding domain that specifically binds CD8, comprises: (i) a VH comprising a VH CDR1, a VH CDR2, and a VH CDR3 having an amino acid sequence of SEQ ID NOs:1633, 1634, and 1635, respectively, and (ii) a VL comprising a VL CDR1, VL CDR2, and VL CDR3 having an amino acid sequence of SEQ ID NOs:1636, 1637, and 1638, respectively. In one embodiment, the first antigen binding domain that specifically binds CD8, comprises: (i) a VH comprising a VH CDR1, a VH CDR2, and a VH CDR3 having an amino acid sequence of SEQ ID NOs:1639, 1640, and 1641, respectively, and (ii) a VL comprising a VL CDR1, VL CDR2, and VL CDR3 having an amino acid sequence of SEQ ID NOs:1642, 1643, and 1644, respectively. In one embodiment, the first antigen binding domain that specifically binds CD8, comprises: (i) a VH comprising a VH CDR1, a VH CDR2, and a VH CDR3 having an amino acid sequence of SEQ ID NOs:1645, 1646, and 1647, respectively, and (ii) a VL comprising a VL CDR1, VL CDR2, and VL CDR3 having an amino acid sequence of SEQ ID NOs:1648, 1649, and 1650, respectively. In one embodiment, the first antigen binding domain that specifically binds CD8, comprises: (i) a VH comprising a VH CDR1, a VH CDR2, and a VH CDR3 having an amino acid sequence of SEQ ID NOs:1651, 1652, and 1653, respectively, and (ii) a VL comprising a VL CDR1, VL CDR2, and VL CDR3 having an amino acid sequence of SEQ ID NOs:1654, 1655, and 1656, respectively. In one embodiment, the first antigen binding domain that specifically binds CD8, comprises: (i) a VH comprising a VH CDR1, a VH CDR2, and a VH CDR3 having an amino acid sequence of SEQ ID NOs:1657, 1658, and 1659, respectively, and (ii) a VL comprising a VL CDR1, VL CDR2, and VL CDR3 having an amino acid sequence of SEQ ID NOs:1660, 1661, and 1662, respectively. In one embodiment, the first antigen binding domain that specifically binds CD8, comprises: (i) a VH comprising a VH CDR1, a VH CDR2, and a VH CDR3 having an amino acid sequence of a VH CDR1, a VH CDR2, and a VH CDR3, respectively, of a VH having an amino acid sequence of SEQ ID NO:1663; and (ii) a VL comprising a VL CDR1, a VL CDR2, and a VL CDR3 having an amino acid sequence of a VL CDR1, a VL CDR2, and a VL CDR3, respectively, of a VL having an amino acid sequence of SEQ ID NO:1664. In one embodiment, the first antigen binding domain that specifically binds CD8, comprises a VH having an amino acid sequence of SEQ ID NO:1663. In one embodiment, the first antigen binding domain that specifically binds CD8, comprises a VL having an amino acid sequence of SEQ ID NO:1664. In one embodiment, the first antigen binding domain that specifically binds CD8, comprises a VH having an amino acid sequence of SEQ ID NO:1663, and a VL having an amino acid sequence of SEQ ID NO:1664. In one embodiment, the first antigen binding domain that specifically binds CD8, comprises a heavy chain having an amino acid sequence of SEQ ID NO:1665. In one embodiment, the first antigen binding domain that specifically binds CD8, comprises a light chain having an amino acid sequence of SEQ ID NO:1666. In one embodiment, the first antigen binding domain that specifically binds CD8, comprises a heavy chain having an amino acid sequence of SEQ ID NO:1665, and a light chain having an amino acid sequence of SEQ ID NO:1666. In one embodiment, the first antigen binding domain that specifically binds CD8, comprises a VH having an amino acid sequence having at least 95% identity to an amino acid sequence of SEQ ID NO:1663. In one embodiment, the first antigen binding domain that specifically binds CD8, comprises a VL having an amino acid sequence having at least 95% identity to an amino acid sequence of SEQ ID NO:1664. In one embodiment, the first antigen binding domain that specifically binds CD8, comprises a VH having an amino acid sequence having at least 95% identity to an amino acid sequence of SEQ ID NO:1663, and a VL having an amino acid sequence having at least 95% identity to an amino acid sequence of SEQ ID NO:1664. In one embodiment, the first antigen binding domain that specifically binds CD8, comprises a heavy chain having an amino acid sequence having at least 95% identity to an amino acid sequence of SEQ ID NO:1665. In one embodiment, the first antigen binding domain that specifically binds CD8, comprises a light chain having an amino acid sequence having at least 95% identity to an amino acid sequence of SEQ ID NO:1666. In one embodiment, the first antigen binding domain that specifically binds CD8, comprises a heavy chain having an amino acid sequence having at least 95% identity to an amino acid sequence of SEQ ID NO:1665, and a light chain having an amino acid sequence having at least 95% identity to an amino acid sequence of SEQ ID NO:1666.

[0238] In one embodiment, the first antigen binding domain that specifically binds CD8, comprises: (i) a VH comprising a VH CDR1, a VH CDR2, and a VH CDR3 having an amino acid sequence of SEQ ID NOs:1667, 1668, and 1669, respectively, and (ii) a VL comprising a VL CDR1, VL CDR2, and VL CDR3 having an amino acid sequence of SEQ ID NOs:1670, 1671, and 1672, respectively. In one embodiment, the first antigen binding domain that specifically binds CD8, comprises: (i) a VH comprising a VH CDR1, a VH CDR2, and a VH CDR3 having an amino acid sequence of SEQ ID NOs:1673, 1674, and 1675, respectively, and (ii) a VL comprising a VL CDR1, VL CDR2, and VL CDR3 having an amino acid sequence of SEQ ID NOs:1676, 1677, and 1678, respectively. In one embodiment, the first antigen binding domain that specifically binds CD8, comprises: (i) a VH comprising a VH CDR1, a VH CDR2, and a VH CDR3 having an amino acid sequence of SEQ ID NOs:1679, 1680, and 1681, respectively, and (ii) a VL comprising a VL CDR1, VL CDR2, and VL CDR3 having an amino acid sequence of SEQ ID NOs:1682, 1683, and 1684, respectively. In one embodiment, the first antigen binding domain that specifically binds CD8, comprises: (i) a VH comprising a VH CDR1, a VH CDR2, and a VH CDR3 having an amino acid sequence of SEQ ID NOs:1685, 1686, and 1687, respectively, and (ii) a VL comprising a VL CDR1, VL CDR2, and VL CDR3 having an amino acid sequence of SEQ ID NOs:1688, 1689, and 1690, respectively. In one embodiment, the first antigen binding domain that specifically binds CD8, comprises: (i) a VH comprising a VH CDR1, a VH CDR2, and a VH CDR3 having an amino acid sequence of SEQ ID NOs:1691, 1692, and 1693, respectively, and (ii) a VL comprising a VL CDR1, VL CDR2, and VL CDR3 having an amino acid sequence of SEQ ID NOs:1694, 1695, and 1696, respectively. In one embodiment, the first antigen binding domain that specifically binds CD8, comprises: (i) a VH comprising a VH CDR1, a VH CDR2, and a VH CDR3 having an amino acid sequence of a VH CDR1, a VH CDR2, and a VH CDR3, respectively, of a VH having an amino acid sequence of SEQ ID NO:1697; and (ii) a VL comprising a VL CDR1, a VL CDR2, and a VL CDR3 having an amino acid sequence of a VL CDR1, a VL CDR2, and a VL CDR3, respectively, of a VL having an amino acid sequence of SEQ ID NO:1698. In one embodiment, the first antigen binding domain that specifically binds CD8, comprises a VH having an amino acid sequence of SEQ ID NO:1697. In one embodiment, the first antigen binding domain that specifically binds CD8, comprises a VL having an amino acid sequence of SEQ ID NO:1698. In one embodiment, the first antigen binding domain that specifically binds CD8, comprises a VH having an amino acid sequence of SEQ ID NO:1697, and a VL having an amino acid sequence of SEQ ID NO:1698. In one embodiment, the first antigen binding domain that specifically binds CD8, comprises a heavy chain having an amino acid sequence of SEQ ID NO:1699. In one embodiment, the first antigen binding domain that specifically binds CD8, comprises a light chain having an amino acid sequence of SEQ ID NO:1700. In one embodiment, the first antigen binding domain that specifically binds CD8, comprises a heavy chain having an amino acid sequence of SEQ ID NO:1699, and a light chain having an amino acid sequence of SEQ ID NO:1700. In one embodiment, the first antigen binding domain that specifically binds CD8, comprises a VH having an amino acid sequence having at least 95% identity to an amino acid sequence of SEQ ID NO:1697. In one embodiment, the first antigen binding domain that specifically binds CD8, comprises a VL having an amino acid sequence having at least 95% identity to an amino acid sequence of SEQ ID NO:1698. In one embodiment, the first antigen binding domain that specifically binds CD8, comprises a VH having an amino acid sequence having at least 95% identity to an amino acid sequence of SEQ ID NO:1697, and a VL having an amino acid sequence having at least 95% identity to an amino acid sequence of SEQ ID NO:1698. In one embodiment, the first antigen binding domain that specifically binds CD8, comprises a heavy chain having an amino acid sequence having at least 95% identity to an amino acid sequence of SEQ ID NO:1699. In one embodiment, the first antigen binding domain that specifically binds CD8, comprises a light chain having an amino acid sequence having at least 95% identity to an amino acid sequence of SEQ ID NO:1700. In one embodiment, the first antigen binding domain that specifically binds CD8, comprises a heavy chain having an amino acid sequence having at least 95% identity to an amino acid sequence of SEQ ID NO:1699, and a light chain having an amino acid sequence having at least 95% identity to an amino acid sequence of SEQ ID NO:1700.

[0239] In one embodiment, the first antigen binding domain that specifically binds CD8, comprises: (i) a VH comprising a VH CDR1, a VH CDR2, and a VH CDR3 having an amino acid sequence of SEQ ID NOs:1701, 1702, and 1703, respectively, and (ii) a VL comprising a VL CDR1, VL CDR2, and VL CDR3 having an amino acid sequence of SEQ ID NOs:1704, 1705, and 1706, respectively. In one embodiment, the first antigen binding domain that specifically binds CD8, comprises: (i) a VH comprising a VH CDR1, a VH CDR2, and a VH CDR3 having an amino acid sequence of SEQ ID NOs:1707, 1708, and 1709, respectively, and (ii) a VL comprising a VL CDR1, VL CDR2, and VL CDR3 having an amino acid sequence of SEQ ID NOs:1710, 1711, and 1712, respectively. In one embodiment, the first antigen binding domain that specifically binds CD8, comprises: (i) a VH comprising a VH CDR1, a VH CDR2, and a VH CDR3 having an amino acid sequence of SEQ ID NOs:1713, 1714, and 1715, respectively, and (ii) a VL comprising a VL CDR1, VL CDR2, and VL CDR3 having an amino acid sequence of SEQ ID NOs:1716, 1717, and 1718, respectively. In one embodiment, the first antigen binding domain that specifically binds CD8, comprises: (i) a VH comprising a VH CDR1, a VH CDR2, and a VH CDR3 having an amino acid sequence of SEQ ID NOs:1719, 1720, and 1721, respectively, and (ii) a VL comprising a VL CDR1, VL CDR2, and VL CDR3 having an amino acid sequence of SEQ ID NOs:1722, 1723, and 1724, respectively. In one embodiment, the first antigen binding domain that specifically binds CD8, comprises: (i) a VH comprising a VH CDR1, a VH CDR2, and a VH CDR3 having an amino acid sequence of SEQ ID NOs:1725, 1726, and 1727, respectively, and (ii) a VL comprising a VL CDR1, VL CDR2, and VL CDR3 having an amino acid sequence of SEQ ID NOs:1728, 1729, and 1730, respectively. In one embodiment, the first antigen binding domain that specifically binds CD8, comprises: (i) a VH comprising a VH CDR1, a VH CDR2, and a VH CDR3 having an amino acid sequence of a VH CDR1, a VH CDR2, and a VH CDR3, respectively, of a VH having an amino acid sequence of SEQ ID NO:1731; and (ii) a VL comprising a VL CDR1, a VL CDR2, and a VL CDR3 having an amino acid sequence of a VL CDR1, a VL CDR2, and a VL CDR3, respectively, of a VL having an amino acid sequence of SEQ ID NO:1732. In one embodiment, the first antigen binding domain that specifically binds CD8, comprises a VH having an amino acid sequence of SEQ ID NO:1731. In one embodiment, the first antigen binding domain that specifically binds CD8, comprises a VL having an amino acid sequence of SEQ ID NO:1732. In one embodiment, the first antigen binding domain that specifically binds CD8, comprises a VH having an amino acid sequence of SEQ ID NO:1731, and a VL having an amino acid sequence of SEQ ID NO:1732. In one embodiment, the first antigen binding domain that specifically binds CD8, comprises a heavy chain having an amino acid sequence of SEQ ID NO:1733. In one embodiment, the first antigen binding domain that specifically binds CD8, comprises a light chain having an amino acid sequence of SEQ ID NO:1734. In one embodiment, the first antigen binding domain that specifically binds CD8, comprises a heavy chain having an amino acid sequence of SEQ ID NO:1733, and a light chain having an amino acid sequence of SEQ ID NO:1734. In one embodiment, the first antigen binding domain that specifically binds CD8, comprises a VH having an amino acid sequence having at least 95% identity to an amino acid sequence of SEQ ID NO:1731. In one embodiment, the first antigen binding domain that specifically binds CD8, comprises a VL having an amino acid sequence having at least 95% identity to an amino acid sequence of SEQ ID NO:1732. In one embodiment, the first antigen binding domain that specifically binds CD8, comprises a VH having an amino acid sequence having at least 95% identity to an amino acid sequence of SEQ ID NO:1731, and a VL having an amino acid sequence having at least 95% identity to an amino acid sequence of SEQ ID NO:1732. In one embodiment, the first antigen binding domain that specifically binds CD8, comprises a heavy chain having an amino acid sequence having at least 95% identity to an amino acid sequence of SEQ ID NO:1733. In one embodiment, the first antigen binding domain that specifically binds CD8, comprises a light chain having an amino acid sequence having at least 95% identity to an amino acid sequence of SEQ ID NO:1734. In one embodiment, the first antigen binding domain that specifically binds CD8, comprises a heavy chain having an amino acid sequence having at least 95% identity to an amino acid sequence of SEQ ID NO:1733, and a light chain having an amino acid sequence having at least 95% identity to an amino acid sequence of SEQ ID NO:1734.

[0240] In one embodiment, the first antigen binding domain that specifically binds CD8, comprises: (i) a VH comprising a VH CDR1, a VH CDR2, and a VH CDR3 having an amino acid sequence of SEQ ID NOs:1735, 1736, and 1737, respectively, and (ii) a VL comprising a VL CDR1, VL CDR2, and VL CDR3 having an amino acid sequence of SEQ ID NOs:1738, 1739, and 1740, respectively. In one embodiment, the first antigen binding domain that specifically binds CD8, comprises: (i) a VH comprising a VH CDR1, a VH CDR2, and a VH CDR3 having an amino acid sequence of SEQ ID NOs:1741, 1742, and 1743, respectively, and (ii) a VL comprising a VL CDR1, VL CDR2, and VL CDR3 having an amino acid sequence of SEQ ID NOs:1744, 1745, and 1746, respectively. In one embodiment, the first antigen binding domain that specifically binds CD8, comprises: (i) a VH comprising a VH CDR1, a VH CDR2, and a VH CDR3 having an amino acid sequence of SEQ ID NOs:1747, 1748, and 1749, respectively, and (ii) a VL comprising a VL CDR1, VL CDR2, and VL CDR3 having an amino acid sequence of SEQ ID NOs:1750, 1751, and 1752, respectively. In one embodiment, the first antigen binding domain that specifically binds CD8, comprises: (i) a VH comprising a VH CDR1, a VH CDR2, and a VH CDR3 having an amino acid sequence of SEQ ID NOs:1753, 1754, and 1755, respectively, and (ii) a VL comprising a VL CDR1, VL CDR2, and VL CDR3 having an amino acid sequence of SEQ ID NOs:1756, 1757, and 1758, respectively. In one embodiment, the first antigen binding domain that specifically binds CD8, comprises: (i) a VH comprising a VH CDR1, a VH CDR2, and a VH CDR3 having an amino acid sequence of SEQ ID NOs:1759, 1760, and 1761, respectively, and (ii) a VL comprising a VL CDR1, VL CDR2, and VL CDR3 having an amino acid sequence of SEQ ID NOs:1762, 1763, and 1764, respectively. In one embodiment, the first antigen binding domain that specifically binds CD8, comprises: (i) a VH comprising a VH CDR1, a VH CDR2, and a VH CDR3 having an amino acid sequence of a VH CDR1, a VH CDR2, and a VH CDR3, respectively, of a VH having an amino acid sequence of SEQ ID NO:1765; and (ii) a VL comprising a VL CDR1, a VL CDR2, and a VL CDR3 having an amino acid sequence of a VL CDR1, a VL CDR2, and a VL CDR3, respectively, of a VL having an amino acid sequence of SEQ ID NO:1766. In one embodiment, the first antigen binding domain that specifically binds CD8, comprises a VH having an amino acid sequence of SEQ ID NO:1765. In one embodiment, the first antigen binding domain that specifically binds CD8, comprises a VL having an amino acid sequence of SEQ ID NO:1766. In one embodiment, the first antigen binding domain that specifically binds CD8, comprises a VH having an amino acid sequence of SEQ ID NO:1765, and a VL having an amino acid sequence of SEQ ID NO:1766. In one embodiment, the first antigen binding domain that specifically binds CD8, comprises a heavy chain having an amino acid sequence of SEQ ID NO:1767. In one embodiment, the first antigen binding domain that specifically binds CD8, comprises a light chain having an amino acid sequence of SEQ ID NO:1768. In one embodiment, the first antigen binding domain that specifically binds CD8, comprises a heavy chain having an amino acid sequence of SEQ ID NO:1767, and a light chain having an amino acid sequence of SEQ ID NO:1768. In one embodiment, the first antigen binding domain that specifically binds CD8, comprises a VH having an amino acid sequence having at least 95% identity to an amino acid sequence of SEQ ID NO:1765. In one embodiment, the first antigen binding domain that specifically binds CD8, comprises a VL having an amino acid sequence having at least 95% identity to an amino acid sequence of SEQ ID NO:1766. In one embodiment, the first antigen binding domain that specifically binds CD8, comprises a VH having an amino acid sequence having at least 95% identity to an amino acid sequence of SEQ ID NO:1765, and a VL having an amino acid sequence having at least 95% identity to an amino acid sequence of SEQ ID NO:1766. In one embodiment, the first antigen binding domain that specifically binds CD8, comprises a heavy chain having an amino acid sequence having at least 95% identity to an amino acid sequence of SEQ ID NO:1767. In one embodiment, the first antigen binding domain that specifically binds CD8, comprises a light chain having an amino acid sequence having at least 95% identity to an amino acid sequence of SEQ ID NO:1768. In one embodiment, the first antigen binding domain that specifically binds CD8, comprises a heavy chain having an amino acid sequence having at least 95% identity to an amino acid sequence of SEQ ID NO:1767, and a light chain having an amino acid sequence having at least 95% identity to an amino acid sequence of SEQ ID NO:1768.

[0241] In one embodiment, the first antigen binding domain that specifically binds CD8, comprises: (i) a VH comprising a VH CDR1, a VH CDR2, and a VH CDR3 having an amino acid sequence of SEQ ID NOs:1769, 1770, and 1771, respectively, and (ii) a VL comprising a VL CDR1, VL CDR2, and VL CDR3 having an amino acid sequence of SEQ ID NOs:1772, 1773, and 1774, respectively. In one embodiment, the first antigen binding domain that specifically binds CD8, comprises: (i) a VH comprising a VH CDR1, a VH CDR2, and a VH CDR3 having an amino acid sequence of SEQ ID NOs:1775, 1776, and 1777, respectively, and (ii) a VL comprising a VL CDR1, VL CDR2, and VL CDR3 having an amino acid sequence of SEQ ID NOs:1778, 1779, and 1780, respectively. In one embodiment, the first antigen binding domain that specifically binds CD8, comprises: (i) a VH comprising a VH CDR1, a VH CDR2, and a VH CDR3 having an amino acid sequence of SEQ ID NOs:1781, 1782, and 1783, respectively, and (ii) a VL comprising a VL CDR1, VL CDR2, and VL CDR3 having an amino acid sequence of SEQ ID NOs:1784, 1785, and 1786, respectively. In one embodiment, the first antigen binding domain that specifically binds CD8, comprises: (i) a VH comprising a VH CDR1, a VH CDR2, and a VH CDR3 having an amino acid sequence of SEQ ID NOs:1787, 1788, and 1789, respectively, and (ii) a VL comprising a VL CDR1, VL CDR2, and VL CDR3 having an amino acid sequence of SEQ ID NOs:1790, 1791, and 1792, respectively. In one embodiment, the first antigen binding domain that specifically binds CD8, comprises: (i) a VH comprising a VH CDR1, a VH CDR2, and a VH CDR3 having an amino acid sequence of SEQ ID NOs:1793, 1794, and 1795, respectively, and (ii) a VL comprising a VL CDR1, VL CDR2, and VL CDR3 having an amino acid sequence of SEQ ID NOs:1796, 1797, and 1798, respectively. In one embodiment, the first antigen binding domain that specifically binds CD8, comprises: (i) a VH comprising a VH CDR1, a VH CDR2, and a VH CDR3 having an amino acid sequence of a VH CDR1, a VH CDR2, and a VH CDR3, respectively, of a VH having an amino acid sequence of SEQ ID NO:1799; and (ii) a VL comprising a VL CDR1, a VL CDR2, and a VL CDR3 having an amino acid sequence of a VL CDR1, a VL CDR2, and a VL CDR3, respectively, of a VL having an amino acid sequence of SEQ ID NO:1800. In one embodiment, the first antigen binding domain that specifically binds CD8, comprises a VH having an amino acid sequence of SEQ ID NO:1799. In one embodiment, the first antigen binding domain that specifically binds CD8, comprises a VL having an amino acid sequence of SEQ ID NO:1800. In one embodiment, the first antigen binding domain that specifically binds CD8, comprises a VH having an amino acid sequence of SEQ ID NO:1799, and a VL having an amino acid sequence of SEQ ID NO:1800. In one embodiment, the first antigen binding domain that specifically binds CD8, comprises a heavy chain having an amino acid sequence of SEQ ID NO:1801. In one embodiment, the first antigen binding domain that specifically binds CD8, comprises a light chain having an amino acid sequence of SEQ ID NO:1802. In one embodiment, the first antigen binding domain that specifically binds CD8, comprises a heavy chain having an amino acid sequence of SEQ ID NO:1801, and a light chain having an amino acid sequence of SEQ ID NO:1802. In one embodiment, the first antigen binding domain that specifically binds CD8, comprises a VH having an amino acid sequence having at least 95% identity to an amino acid sequence of SEQ ID NO:1799. In one embodiment, the first antigen binding domain that specifically binds CD8, comprises a VL having an amino acid sequence having at least 95% identity to an amino acid sequence of SEQ ID NO:1800. In one embodiment, the first antigen binding domain that specifically binds CD8, comprises a VH having an amino acid sequence having at least 95% identity to an amino acid sequence of SEQ ID NO:1799, and a VL having an amino acid sequence having at least 95% identity to an amino acid sequence of SEQ ID NO:1800. In one embodiment, the first antigen binding domain that specifically binds CD8, comprises a heavy chain having an amino acid sequence having at least 95% identity to an amino acid sequence of SEQ ID NO:1801. In one embodiment, the first antigen binding domain that specifically binds CD8, comprises a light chain having an amino acid sequence having at least 95% identity to an amino acid sequence of SEQ ID NO:1802. In one embodiment, the first antigen binding domain that specifically binds CD8, comprises a heavy chain having an amino acid sequence having at least 95% identity to an amino acid sequence of SEQ ID NO:1801, and a light chain having an amino acid sequence having at least 95% identity to an amino acid sequence of SEQ ID NO:1802.

[0242] In one embodiment, the first antigen binding domain that specifically binds CD8, comprises: (i) a VH comprising a VH CDR1, a VH CDR2, and a VH CDR3 having an amino acid sequence of SEQ ID NOs:1803, 1804, and 1805, respectively, and (ii) a VL comprising a VL CDR1, VL CDR2, and VL CDR3 having an amino acid sequence of SEQ ID NOs:1806, 1807, and 1808, respectively. In one embodiment, the first antigen binding domain that specifically binds CD8, comprises: (i) a VH comprising a VH CDR1, a VH CDR2, and a VH CDR3 having an amino acid sequence of SEQ ID NOs:1809, 1810, and 1811, respectively, and (ii) a VL comprising a VL CDR1, VL CDR2, and VL CDR3 having an amino acid sequence of SEQ ID NOs:1812, 1813, and 1814, respectively. In one embodiment, the first antigen binding domain that specifically binds CD8, comprises: (i) a VH comprising a VH CDR1, a VH CDR2, and a VH CDR3 having an amino acid sequence of SEQ ID NOs:1815, 1816, and 1817, respectively, and (ii) a VL comprising a VL CDR1, VL CDR2, and VL CDR3 having an amino acid sequence of SEQ ID NOs:1818, 1819, and 1820, respectively. In one embodiment, the first antigen binding domain that specifically binds CD8, comprises: (i) a VH comprising a VH CDR1, a VH CDR2, and a VH CDR3 having an amino acid sequence of SEQ ID NOs:1821, 1822, and 1823, respectively, and (ii) a VL comprising a VL CDR1, VL CDR2, and VL CDR3 having an amino acid sequence of SEQ ID NOs:1824, 1825, and 1826, respectively. In one embodiment, the first antigen binding domain that specifically binds CD8, comprises: (i) a VH comprising a VH CDR1, a VH CDR2, and a VH CDR3 having an amino acid sequence of SEQ ID NOs:1827, 1828, and 1829, respectively, and (ii) a VL comprising a VL CDR1, VL CDR2, and VL CDR3 having an amino acid sequence of SEQ ID NOs:1830, 1831, and 1832, respectively. In one embodiment, the first antigen binding domain that specifically binds CD8, comprises: (i) a VH comprising a VH CDR1, a VH CDR2, and a VH CDR3 having an amino acid sequence of a VH CDR1, a VH CDR2, and a VH CDR3, respectively, of a VH having an amino acid sequence of SEQ ID NO:1833; and (ii) a VL comprising a VL CDR1, a VL CDR2, and a VL CDR3 having an amino acid sequence of a VL CDR1, a VL CDR2, and a VL CDR3, respectively, of a VL having an amino acid sequence of SEQ ID NO:1834. In one embodiment, the first antigen binding domain that specifically binds CD8, comprises a VH having an amino acid sequence of SEQ ID NO:1833. In one embodiment, the first antigen binding domain that specifically binds CD8, comprises a VL having an amino acid sequence of SEQ ID NO:1834. In one embodiment, the first antigen binding domain that specifically binds CD8, comprises a VH having an amino acid sequence of SEQ ID NO:1833, and a VL having an amino acid sequence of SEQ ID NO:1834. In one embodiment, the first antigen binding domain that specifically binds CD8, comprises a heavy chain having an amino acid sequence of SEQ ID NO:1835. In one embodiment, the first antigen binding domain that specifically binds CD8, comprises a light chain having an amino acid sequence of SEQ ID NO:1836. In one embodiment, the first antigen binding domain that specifically binds CD8, comprises a heavy chain having an amino acid sequence of SEQ ID NO:1835, and a light chain having an amino acid sequence of SEQ ID NO:1836. In one embodiment, the first antigen binding domain that specifically binds CD8, comprises a VH having an amino acid sequence having at least 95% identity to an amino acid sequence of SEQ ID NO:1833. In one embodiment, the first antigen binding domain that specifically binds CD8, comprises a VL having an amino acid sequence having at least 95% identity to an amino acid sequence of SEQ ID NO:1834. In one embodiment, the first antigen binding domain that specifically binds CD8, comprises a VH having an amino acid sequence having at least 95% identity to an amino acid sequence of SEQ ID NO:1833, and a VL having an amino acid sequence having at least 95% identity to an amino acid sequence of SEQ ID NO:1834. In one embodiment, the first antigen binding domain that specifically binds CD8, comprises a heavy chain having an amino acid sequence having at least 95% identity to an amino acid sequence of SEQ ID NO:1835. In one embodiment, the first antigen binding domain that specifically binds CD8, comprises a light chain having an amino acid sequence having at least 95% identity to an amino acid sequence of SEQ ID NO:1836. In one embodiment, the first antigen binding domain that specifically binds CD8, comprises a heavy chain having an amino acid sequence having at least 95% identity to an amino acid sequence of SEQ ID NO:1835, and a light chain having an amino acid sequence having at least 95% identity to an amino acid sequence of SEQ ID NO:1836.

[0243] In one embodiment, the first antigen binding domain that specifically binds CD8, comprises: (i) a VH comprising a VH CDR1, a VH CDR2, and a VH CDR3 having an amino acid sequence of SEQ ID NOs:1837, 1838, and 1839, respectively, and (ii) a VL comprising a VL CDR1, VL CDR2, and VL CDR3 having an amino acid sequence of SEQ ID NOs:1840, 1841, and 1842, respectively. In one embodiment, the first antigen binding domain that specifically binds CD8, comprises: (i) a VH comprising a VH CDR1, a VH CDR2, and a VH CDR3 having an amino acid sequence of SEQ ID NOs:1843, 1844, and 1845, respectively, and (ii) a VL comprising a VL CDR1, VL CDR2, and VL CDR3 having an amino acid sequence of SEQ ID NOs:1846, 1847, and 1848, respectively. In one embodiment, the first antigen binding domain that specifically binds CD8, comprises: (i) a VH comprising a VH CDR1, a VH CDR2, and a VH CDR3 having an amino acid sequence of SEQ ID NOs:1849, 1850, and 1851, respectively, and (ii) a VL comprising a VL CDR1, VL CDR2, and VL CDR3 having an amino acid sequence of SEQ ID NOs:1852, 1853, and 1854, respectively. In one embodiment, the first antigen binding domain that specifically binds CD8, comprises: (i) a VH comprising a VH CDR1, a VH CDR2, and a VH CDR3 having an amino acid sequence of SEQ ID NOs:1855, 1856, and 1857, respectively, and (ii) a VL comprising a VL CDR1, VL CDR2, and VL CDR3 having an amino acid sequence of SEQ ID NOs:1858, 1859, and 1860, respectively. In one embodiment, the first antigen binding domain that specifically binds CD8, comprises: (i) a VH comprising a VH CDR1, a VH CDR2, and a VH CDR3 having an amino acid sequence of SEQ ID NOs:1861, 1862, and 1863, respectively, and (ii) a VL comprising a VL CDR1, VL CDR2, and VL CDR3 having an amino acid sequence of SEQ ID NOs:1864, 1865, and 1866, respectively. In one embodiment, the first antigen binding domain that specifically binds CD8, comprises: (i) a VH comprising a VH CDR1, a VH CDR2, and a VH CDR3 having an amino acid sequence of a VH CDR1, a VH CDR2, and a VH CDR3, respectively, of a VH having an amino acid sequence of SEQ ID NO:1867; and (ii) a VL comprising a VL CDR1, a VL CDR2, and a VL CDR3 having an amino acid sequence of a VL CDR1, a VL CDR2, and a VL CDR3, respectively, of a VL having an amino acid sequence of SEQ ID NO:1868. In one embodiment, the first antigen binding domain that specifically binds CD8, comprises a VH having an amino acid sequence of SEQ ID NO:1867. In one embodiment, the first antigen binding domain that specifically binds CD8, comprises a VL having an amino acid sequence of SEQ ID NO:1868. In one embodiment, the first antigen binding domain that specifically binds CD8, comprises a VH having an amino acid sequence of SEQ ID NO:1867, and a VL having an amino acid sequence of SEQ ID NO:1868. In one embodiment, the first antigen binding domain that specifically binds CD8, comprises a heavy chain having an amino acid sequence of SEQ ID NO:1869. In one embodiment, the first antigen binding domain that specifically binds CD8, comprises a light chain having an amino acid sequence of SEQ ID NO:1870. In one embodiment, the first antigen binding domain that specifically binds CD8, comprises a heavy chain having an amino acid sequence of SEQ ID NO:1869, and a light chain having an amino acid sequence of SEQ ID NO:1870. In one embodiment, the first antigen binding domain that specifically binds CD8, comprises a VH having an amino acid sequence having at least 95% identity to an amino acid sequence of SEQ ID NO:1867. In one embodiment, the first antigen binding domain that specifically binds CD8, comprises a VL having an amino acid sequence having at least 95% identity to an amino acid sequence of SEQ ID NO:1868. In one embodiment, the first antigen binding domain that specifically binds CD8, comprises a VH having an amino acid sequence having at least 95% identity to an amino acid sequence of SEQ ID NO:1867, and a VL having an amino acid sequence having at least 95% identity to an amino acid sequence of SEQ ID NO:1868. In one embodiment, the first antigen binding domain that specifically binds CD8, comprises a heavy chain having an amino acid sequence having at least 95% identity to an amino acid sequence of SEQ ID NO:1869. In one embodiment, the first antigen binding domain that specifically binds CD8, comprises a light chain having an amino acid sequence having at least 95% identity to an amino acid sequence of SEQ ID NO:1870. In one embodiment, the first antigen binding domain that specifically binds CD8, comprises a heavy chain having an amino acid sequence having at least 95% identity to an amino acid sequence of SEQ ID NO:1869, and a light chain having an amino acid sequence having at least 95% identity to an amino acid sequence of SEQ ID NO:1870.

[0244] In one embodiment, the first antigen binding domain that specifically binds CD8, comprises: (i) a VH comprising a VH CDR1, a VH CDR2, and a VH CDR3 having an amino acid sequence of SEQ ID NOs:1871, 1872, and 1873, respectively, and (ii) a VL comprising a VL CDR1, VL CDR2, and VL CDR3 having an amino acid sequence of SEQ ID NOs:1874, 1875, and 1876, respectively. In one embodiment, the first antigen binding domain that specifically binds CD8, comprises: (i) a VH comprising a VH CDR1, a VH CDR2, and a VH CDR3 having an amino acid sequence of SEQ ID NOs:1877, 1878, and 1879, respectively, and (ii) a VL comprising a VL CDR1, VL CDR2, and VL CDR3 having an amino acid sequence of SEQ ID NOs:1880, 1881, and 1882, respectively. In one embodiment, the first antigen binding domain that specifically binds CD8, comprises: (i) a VH comprising a VH CDR1, a VH CDR2, and a VH CDR3 having an amino acid sequence of SEQ ID NOs:1883, 1884, and 1885, respectively, and (ii) a VL comprising a VL CDR1, VL CDR2, and VL CDR3 having an amino acid sequence of SEQ ID NOs:1886, 1887, and 1888, respectively. In one embodiment, the first antigen binding domain that specifically binds CD8, comprises: (i) a VH comprising a VH CDR1, a VH CDR2, and a VH CDR3 having an amino acid sequence of SEQ ID NOs:1889, 1890, and 1891, respectively, and (ii) a VL comprising a VL CDR1, VL CDR2, and VL CDR3 having an amino acid sequence of SEQ ID NOs:1892, 1893, and 1894, respectively. In one embodiment, the first antigen binding domain that specifically binds CD8, comprises: (i) a VH comprising a VH CDR1, a VH CDR2, and a VH CDR3 having an amino acid sequence of SEQ ID NOs:1895, 1896, and 1897, respectively, and (ii) a VL comprising a VL CDR1, VL CDR2, and VL CDR3 having an amino acid sequence of SEQ ID NOs:1898, 1899, and 1900, respectively. In one embodiment, the first antigen binding domain that specifically binds CD8, comprises: (i) a VH comprising a VH CDR1, a VH CDR2, and a VH CDR3 having an amino acid sequence of a VH CDR1, a VH CDR2, and a VH CDR3, respectively, of a VH having an amino acid sequence of SEQ ID NO:1901; and (ii) a VL comprising a VL CDR1, a VL CDR2, and a VL CDR3 having an amino acid sequence of a VL CDR1, a VL CDR2, and a VL CDR3, respectively, of a VL having an amino acid sequence of SEQ ID NO:1902. In one embodiment, the first antigen binding domain that specifically binds CD8, comprises a VH having an amino acid sequence of SEQ ID NO:1901. In one embodiment, the first antigen binding domain that specifically binds CD8, comprises a VL having an amino acid sequence of SEQ ID NO:1902. In one embodiment, the first antigen binding domain that specifically binds CD8, comprises a VH having an amino acid sequence of SEQ ID NO:1901, and a VL having an amino acid sequence of SEQ ID NO:1902. In one embodiment, the first antigen binding domain that specifically binds CD8, comprises a heavy chain having an amino acid sequence of SEQ ID NO:1903. In one embodiment, the first antigen binding domain that specifically binds CD8, comprises a light chain having an amino acid sequence of SEQ ID NO:1904. In one embodiment, the first antigen binding domain that specifically binds CD8, comprises a heavy chain having an amino acid sequence of SEQ ID NO:1903, and a light chain having an amino acid sequence of SEQ ID NO:1904. In one embodiment, the first antigen binding domain that specifically binds CD8, comprises a VH having an amino acid sequence having at least 95% identity to an amino acid sequence of SEQ ID NO:1901. In one embodiment, the first antigen binding domain that specifically binds CD8, comprises a VL having an amino acid sequence having at least 95% identity to an amino acid sequence of SEQ ID NO:1902. In one embodiment, the first antigen binding domain that specifically binds CD8, comprises a VH having an amino acid sequence having at least 95% identity to an amino acid sequence of SEQ ID NO:1901, and a VL having an amino acid sequence having at least 95% identity to an amino acid sequence of SEQ ID NO:1902. In one embodiment, the first antigen binding domain that specifically binds CD8, comprises a heavy chain having an amino acid sequence having at least 95% identity to an amino acid sequence of SEQ ID NO:1903. In one embodiment, the first antigen binding domain that specifically binds CD8, comprises a light chain having an amino acid sequence having at least 95% identity to an amino acid sequence of SEQ ID NO:1904. In one embodiment, the first antigen binding domain that specifically binds CD8, comprises a heavy chain having an amino acid sequence having at least 95% identity to an amino acid sequence of SEQ ID NO:1903, and a light chain having an amino acid sequence having at least 95% identity to an amino acid sequence of SEQ ID NO:1904.

[0245] In one embodiment, the first antigen binding domain that specifically binds CD8, comprises: (i) a VH comprising a VH CDR1, a VH CDR2, and a VH CDR3 having an amino acid sequence of SEQ ID NOs:1905, 1906, and 1907, respectively, and (ii) a VL comprising a VL CDR1, VL CDR2, and VL CDR3 having an amino acid sequence of SEQ ID NOs:1908, 1909, and 1910, respectively. In one embodiment, the first antigen binding domain that specifically binds CD8, comprises: (i) a VH comprising a VH CDR1, a VH CDR2, and a VH CDR3 having an amino acid sequence of SEQ ID NOs:1911, 1912, and 1913, respectively, and (ii) a VL comprising a VL CDR1, VL CDR2, and VL CDR3 having an amino acid sequence of SEQ ID NOs:1914, 1915, and 1916, respectively. In one embodiment, the first antigen binding domain that specifically binds CD8, comprises: (i) a VH comprising a VH CDR1, a VH CDR2, and a VH CDR3 having an amino acid sequence of SEQ ID NOs:1917, 1918, and 1919, respectively, and (ii) a VL comprising a VL CDR1, VL CDR2, and VL CDR3 having an amino acid sequence of SEQ ID NOs:1920, 1921, and 1922, respectively. In one embodiment, the first antigen binding domain that specifically binds CD8, comprises: (i) a VH comprising a VH CDR1, a VH CDR2, and a VH CDR3 having an amino acid sequence of SEQ ID NOs:1923, 1924, and 1925, respectively, and (ii) a VL comprising a VL CDR1, VL CDR2, and VL CDR3 having an amino acid sequence of SEQ ID NOs:1926, 1927, and 1928, respectively. In one embodiment, the first antigen binding domain that specifically binds CD8, comprises: (i) a VH comprising a VH CDR1, a VH CDR2, and a VH CDR3 having an amino acid sequence of SEQ ID NOs:1929, 1930, and 1931, respectively, and (ii) a VL comprising a VL CDR1, VL CDR2, and VL CDR3 having an amino acid sequence of SEQ ID NOs:1932, 1933, and 1934, respectively. In one embodiment, the first antigen binding domain that specifically binds CD8, comprises: (i) a VH comprising a VH CDR1, a VH CDR2, and a VH CDR3 having an amino acid sequence of a VH CDR1, a VH CDR2, and a VH CDR3, respectively, of a VH having an amino acid sequence of SEQ ID NO:1935; and (ii) a VL comprising a VL CDR1, a VL CDR2, and a VL CDR3 having an amino acid sequence of a VL CDR1, a VL CDR2, and a VL CDR3, respectively, of a VL having an amino acid sequence of SEQ ID NO:1936. In one embodiment, the first antigen binding domain that specifically binds CD8, comprises a VH having an amino acid sequence of SEQ ID NO:1935. In one embodiment, the first antigen binding domain that specifically binds CD8, comprises a VL having an amino acid sequence of SEQ ID NO:1936. In one embodiment, the first antigen binding domain that specifically binds CD8, comprises a VH having an amino acid sequence of SEQ ID NO:1935, and a VL having an amino acid sequence of SEQ ID NO:1936. In one embodiment, the first antigen binding domain that specifically binds CD8, comprises a heavy chain having an amino acid sequence of SEQ ID NO:1937. In one embodiment, the first antigen binding domain that specifically binds CD8, comprises a light chain having an amino acid sequence of SEQ ID NO:1938. In one embodiment, the first antigen binding domain that specifically binds CD8, comprises a heavy chain having an amino acid sequence of SEQ ID NO:1937, and a light chain having an amino acid sequence of SEQ ID NO:1938. In one embodiment, the first antigen binding domain that specifically binds CD8, comprises a VH having an amino acid sequence having at least 95% identity to an amino acid sequence of SEQ ID NO:1935. In one embodiment, the first antigen binding domain that specifically binds CD8, comprises a VL having an amino acid sequence having at least 95% identity to an amino acid sequence of SEQ ID NO:1936. In one embodiment, the first antigen binding domain that specifically binds CD8, comprises a VH having an amino acid sequence having at least 95% identity to an amino acid sequence of SEQ ID NO:1935, and a VL having an amino acid sequence having at least 95% identity to an amino acid sequence of SEQ ID NO:1936. In one embodiment, the first antigen binding domain that specifically binds CD8, comprises a heavy chain having an amino acid sequence having at least 95% identity to an amino acid sequence of SEQ ID NO:1937. In one embodiment, the first antigen binding domain that specifically binds CD8, comprises a light chain having an amino acid sequence having at least 95% identity to an amino acid sequence of SEQ ID NO:1938. In one embodiment, the first antigen binding domain that specifically binds CD8, comprises a heavy chain having an amino acid sequence having at least 95% identity to an amino acid sequence of SEQ ID NO:1937, and a light chain having an amino acid sequence having at least 95% identity to an amino acid sequence of SEQ ID NO:1938.

[0246] In one embodiment, the first antigen binding domain that specifically binds CD8, comprises: (i) a VH comprising a VH CDR1, a VH CDR2, and a VH CDR3 having an amino acid sequence of SEQ ID NOs:1939, 1940, and 1941, respectively, and (ii) a VL comprising a VL CDR1, VL CDR2, and VL CDR3 having an amino acid sequence of SEQ ID NOs:1942, 1943, and 1944, respectively. In one embodiment, the first antigen binding domain that specifically binds CD8, comprises: (i) a VH comprising a VH CDR1, a VH CDR2, and a VH CDR3 having an amino acid sequence of SEQ ID NOs:1945, 1946, and 1947, respectively, and (ii) a VL comprising a VL CDR1, VL CDR2, and VL CDR3 having an amino acid sequence of SEQ ID NOs:1948, 1949, and 1950, respectively. In one embodiment, the first antigen binding domain that specifically binds CD8, comprises: (i) a VH comprising a VH CDR1, a VH CDR2, and a VH CDR3 having an amino acid sequence of SEQ ID NOs:1951, 1952, and 1953, respectively, and (ii) a VL comprising a VL CDR1, VL CDR2, and VL CDR3 having an amino acid sequence of SEQ ID NOs:1954, 1955, and 1956, respectively. In one embodiment, the first antigen binding domain that specifically binds CD8, comprises: (i) a VH comprising a VH CDR1, a VH CDR2, and a VH CDR3 having an amino acid sequence of SEQ ID NOs:1957, 1958, and 1959, respectively, and (ii) a VL comprising a VL CDR1, VL CDR2, and VL CDR3 having an amino acid sequence of SEQ ID NOs:1960, 1961, and 1962, respectively. In one embodiment, the first antigen binding domain that specifically binds CD8, comprises: (i) a VH comprising a VH CDR1, a VH CDR2, and a VH CDR3 having an amino acid sequence of SEQ ID NOs:1963, 1964, and 1965, respectively, and (ii) a VL comprising a VL CDR1, VL CDR2, and VL CDR3 having an amino acid sequence of SEQ ID NOs:1966, 1967, and 1968, respectively. In one embodiment, the first antigen binding domain that specifically binds CD8, comprises: (i) a VH comprising a VH CDR1, a VH CDR2, and a VH CDR3 having an amino acid sequence of a VH CDR1, a VH CDR2, and a VH CDR3, respectively, of a VH having an amino acid sequence of SEQ ID NO:1969; and (ii) a VL comprising a VL CDR1, a VL CDR2, and a VL CDR3 having an amino acid sequence of a VL CDR1, a VL CDR2, and a VL CDR3, respectively, of a VL having an amino acid sequence of SEQ ID NO:1970. In one embodiment, the first antigen binding domain that specifically binds CD8, comprises a VH having an amino acid sequence of SEQ ID NO:1969. In one embodiment, the first antigen binding domain that specifically binds CD8, comprises a VL having an amino acid sequence of SEQ ID NO:1970. In one embodiment, the first antigen binding domain that specifically binds CD8, comprises a VH having an amino acid sequence of SEQ ID NO:1969, and a VL having an amino acid sequence of SEQ ID NO:1970. In one embodiment, the first antigen binding domain that specifically binds CD8, comprises a heavy chain having an amino acid sequence of SEQ ID NO:1971. In one embodiment, the first antigen binding domain that specifically binds CD8, comprises a light chain having an amino acid sequence of SEQ ID NO:1972. In one embodiment, the first antigen binding domain that specifically binds CD8, comprises a heavy chain having an amino acid sequence of SEQ ID NO:1971, and a light chain having an amino acid sequence of SEQ ID NO:1972. In one embodiment, the first antigen binding domain that specifically binds CD8, comprises a VH having an amino acid sequence having at least 95% identity to an amino acid sequence of SEQ ID NO:1969. In one embodiment, the first antigen binding domain that specifically binds CD8, comprises a VL having an amino acid sequence having at least 95% identity to an amino acid sequence of SEQ ID NO:1970. In one embodiment, the first antigen binding domain that specifically binds CD8, comprises a VH having an amino acid sequence having at least 95% identity to an amino acid sequence of SEQ ID NO:1969, and a VL having an amino acid sequence having at least 95% identity to an amino acid sequence of SEQ ID NO:1970. In one embodiment, the first antigen binding domain that specifically binds CD8, comprises a heavy chain having an amino acid sequence having at least 95% identity to an amino acid sequence of SEQ ID NO:1971. In one embodiment, the first antigen binding domain that specifically binds CD8, comprises a light chain having an amino acid sequence having at least 95% identity to an amino acid sequence of SEQ ID NO:1972. In one embodiment, the first antigen binding domain that specifically binds CD8, comprises a heavy chain having an amino acid sequence having at least 95% identity to an amino acid sequence of SEQ ID NO:1971, and a light chain having an amino acid sequence having at least 95% identity to an amino acid sequence of SEQ ID NO:1972.

[0247] In one embodiment, the first antigen binding domain that specifically binds CD8, comprises: (i) a VH comprising a VH CDR1, a VH CDR2, and a VH CDR3 having an amino acid sequence of SEQ ID NOs:1973, 1974, and 1975, respectively, and (ii) a VL comprising a VL CDR1, VL CDR2, and VL CDR3 having an amino acid sequence of SEQ ID NOs:1976, 1977, and 1978, respectively. In one embodiment, the first antigen binding domain that specifically binds CD8, comprises: (i) a VH comprising a VH CDR1, a VH CDR2, and a VH CDR3 having an amino acid sequence of SEQ ID NOs:1979, 1980, and 1981, respectively, and (ii) a VL comprising a VL CDR1, VL CDR2, and VL CDR3 having an amino acid sequence of SEQ ID NOs:1982, 1983, and 1984, respectively. In one embodiment, the first antigen binding domain that specifically binds CD8, comprises: (i) a VH comprising a VH CDR1, a VH CDR2, and a VH CDR3 having an amino acid sequence of SEQ ID NOs:1985, 1986, and 1987, respectively, and (ii) a VL comprising a VL CDR1, VL CDR2, and VL CDR3 having an amino acid sequence of SEQ ID NOs:1988, 1989, and 1990, respectively. In one embodiment, the first antigen binding domain that specifically binds CD8, comprises: (i) a VH comprising a VH CDR1, a VH CDR2, and a VH CDR3 having an amino acid sequence of SEQ ID NOs:1991, 1992, and 1993, respectively, and (ii) a VL comprising a VL CDR1, VL CDR2, and VL CDR3 having an amino acid sequence of SEQ ID NOs:1994, 1995, and 1996, respectively. In one embodiment, the first antigen binding domain that specifically binds CD8, comprises: (i) a VH comprising a VH CDR1, a VH CDR2, and a VH CDR3 having an amino acid sequence of SEQ ID NOs:1997, 1998, and 1999, respectively, and (ii) a VL comprising a VL CDR1, VL CDR2, and VL CDR3 having an amino acid sequence of SEQ ID NOs:2000, 2001, and 2002, respectively. In one embodiment, the first antigen binding domain that specifically binds CD8, comprises: (i) a VH comprising a VH CDR1, a VH CDR2, and a VH CDR3 having an amino acid sequence of a VH CDR1, a VH CDR2, and a VH CDR3, respectively, of a VH having an amino acid sequence of SEQ ID NO:2003; and (ii) a VL comprising a VL CDR1, a VL CDR2, and a VL CDR3 having an amino acid sequence of a VL CDR1, a VL CDR2, and a VL CDR3, respectively, of a VL having an amino acid sequence of SEQ ID NO:2004. In one embodiment, the first antigen binding domain that specifically binds CD8, comprises a VH having an amino acid sequence of SEQ ID NO:2003. In one embodiment, the first antigen binding domain that specifically binds CD8, comprises a VL having an amino acid sequence of SEQ ID NO:2004. In one embodiment, the first antigen binding domain that specifically binds CD8, comprises a VH having an amino acid sequence of SEQ ID NO:2003, and a VL having an amino acid sequence of SEQ ID NO:2004. In one embodiment, the first antigen binding domain that specifically binds CD8, comprises a heavy chain having an amino acid sequence of SEQ ID NO:2005. In one embodiment, the first antigen binding domain that specifically binds CD8, comprises a light chain having an amino acid sequence of SEQ ID NO:2006. In one embodiment, the first antigen binding domain that specifically binds CD8, comprises a heavy chain having an amino acid sequence of SEQ ID NO:2005, and a light chain having an amino acid sequence of SEQ ID NO:2006. In one embodiment, the first antigen binding domain that specifically binds CD8, comprises a VH having an amino acid sequence having at least 95% identity to an amino acid sequence of SEQ ID NO:2003. In one embodiment, the first antigen binding domain that specifically binds CD8, comprises a VL having an amino acid sequence having at least 95% identity to an amino acid sequence of SEQ ID NO:2004. In one embodiment, the first antigen binding domain that specifically binds CD8, comprises a VH having an amino acid sequence having at least 95% identity to an amino acid sequence of SEQ ID NO:2003, and a VL having an amino acid sequence having at least 95% identity to an amino acid sequence of SEQ ID NO:2004. In one embodiment, the first antigen binding domain that specifically binds CD8, comprises a heavy chain having an amino acid sequence having at least 95% identity to an amino acid sequence of SEQ ID NO:2005. In one embodiment, the first antigen binding domain that specifically binds CD8, comprises a light chain having an amino acid sequence having at least 95% identity to an amino acid sequence of SEQ ID NO:2006. In one embodiment, the first antigen binding domain that specifically binds CD8, comprises a heavy chain having an amino acid sequence having at least 95% identity to an amino acid sequence of SEQ ID NO:2005, and a light chain having an amino acid sequence having at least 95% identity to an amino acid sequence of SEQ ID NO:2006.

[0248] In one embodiment, the first antigen binding domain that specifically binds CD8, comprises: (i) a VH comprising a VH CDR1, a VH CDR2, and a VH CDR3 having an amino acid sequence of SEQ ID NOs:2007, 2008, and 2009, respectively, and (ii) a VL comprising a VL CDR1, VL CDR2, and VL CDR3 having an amino acid sequence of SEQ ID NOs:2010, 2011, and 2012, respectively. In one embodiment, the first antigen binding domain that specifically binds CD8, comprises: (i) a VH comprising a VH CDR1, a VH CDR2, and a VH CDR3 having an amino acid sequence of SEQ ID NOs:2013, 2014, and 2015, respectively, and (ii) a VL comprising a VL CDR1, VL CDR2, and VL CDR3 having an amino acid sequence of SEQ ID NOs:2016, 2017, and 2018, respectively. In one embodiment, the first antigen binding domain that specifically binds CD8, comprises: (i) a VH comprising a VH CDR1, a VH CDR2, and a VH CDR3 having an amino acid sequence of SEQ ID NOs:2019, 2020, and 2021, respectively, and (ii) a VL comprising a VL CDR1, VL CDR2, and VL CDR3 having an amino acid sequence of SEQ ID NOs:2022, 2023, and 2024, respectively. In one embodiment, the first antigen binding domain that specifically binds CD8, comprises: (i) a VH comprising a VH CDR1, a VH CDR2, and a VH CDR3 having an amino acid sequence of SEQ ID NOs:2025, 2026, and 2027, respectively, and (ii) a VL comprising a VL CDR1, VL CDR2, and VL CDR3 having an amino acid sequence of SEQ ID NOs:2028, 2029, and 2030, respectively. In one embodiment, the first antigen binding domain that specifically binds CD8, comprises: (i) a VH comprising a VH CDR1, a VH CDR2, and a VH CDR3 having an amino acid sequence of SEQ ID NOs:2031, 2032, and 2033, respectively, and (ii) a VL comprising a VL CDR1, VL CDR2, and VL CDR3 having an amino acid sequence of SEQ ID NOs:2034, 2035, and 2036, respectively. In one embodiment, the first antigen binding domain that specifically binds CD8, comprises: (i) a VH comprising a VH CDR1, a VH CDR2, and a VH CDR3 having an amino acid sequence of a VH CDR1, a VH CDR2, and a VH CDR3, respectively, of a VH having an amino acid sequence of SEQ ID NO:2037; and (ii) a VL comprising a VL CDR1, a VL CDR2, and a VL CDR3 having an amino acid sequence of a VL CDR1, a VL CDR2, and a VL CDR3, respectively, of a VL having an amino acid sequence of SEQ ID NO:2038. In one embodiment, the first antigen binding domain that specifically binds CD8, comprises a VH having an amino acid sequence of SEQ ID NO:2037. In one embodiment, the first antigen binding domain that specifically binds CD8, comprises a VL having an amino acid sequence of SEQ ID NO:2038. In one embodiment, the first antigen binding domain that specifically binds CD8, comprises a VH having an amino acid sequence of SEQ ID NO:2037, and a VL having an amino acid sequence of SEQ ID NO:2038. In one embodiment, the first antigen binding domain that specifically binds CD8, comprises a heavy chain having an amino acid sequence of SEQ ID NO:2039. In one embodiment, the first antigen binding domain that specifically binds CD8, comprises a light chain having an amino acid sequence of SEQ ID NO:2040. In one embodiment, the first antigen binding domain that specifically binds CD8, comprises a heavy chain having an amino acid sequence of SEQ ID NO:2039, and a light chain having an amino acid sequence of SEQ ID NO:2040. In one embodiment, the first antigen binding domain that specifically binds CD8, comprises a VH having an amino acid sequence having at least 95% identity to an amino acid sequence of SEQ ID NO:2037. In one embodiment, the first antigen binding domain that specifically binds CD8, comprises a VL having an amino acid sequence having at least 95% identity to an amino acid sequence of SEQ ID NO:2038. In one embodiment, the first antigen binding domain that specifically binds CD8, comprises a VH having an amino acid sequence having at least 95% identity to an amino acid sequence of SEQ ID NO:2037, and a VL having an amino acid sequence having at least 95% identity to an amino acid sequence of SEQ ID NO:2038. In one embodiment, the first antigen binding domain that specifically binds CD8, comprises a heavy chain having an amino acid sequence having at least 95% identity to an amino acid sequence of SEQ ID NO:2039. In one embodiment, the first antigen binding domain that specifically binds CD8, comprises a light chain having an amino acid sequence having at least 95% identity to an amino acid sequence of SEQ ID NO:2040. In one embodiment, the first antigen binding domain that specifically binds CD8, comprises a heavy chain having an amino acid sequence having at least 95% identity to an amino acid sequence of SEQ ID NO:2039, and a light chain having an amino acid sequence having at least 95% identity to an amino acid sequence of SEQ ID NO:2040.

[0249] In one embodiment, the first antigen binding domain that specifically binds CD8, comprises: (i) a VH comprising a VH CDR1, a VH CDR2, and a VH CDR3 having an amino acid sequence of SEQ ID NOs:2041, 2042, and 2043, respectively, and (ii) a VL comprising a VL CDR1, VL CDR2, and VL CDR3 having an amino acid sequence of SEQ ID NOs:2044, 2045, and 2046, respectively. In one embodiment, the first antigen binding domain that specifically binds CD8, comprises: (i) a VH comprising a VH CDR1, a VH CDR2, and a VH CDR3 having an amino acid sequence of SEQ ID NOs:2047, 2048, and 2049, respectively, and (ii) a VL comprising a VL CDR1, VL CDR2, and VL CDR3 having an amino acid sequence of SEQ ID NOs:2050, 2051, and 2052, respectively. In one embodiment, the first antigen binding domain that specifically binds CD8, comprises: (i) a VH comprising a VH CDR1, a VH CDR2, and a VH CDR3 having an amino acid sequence of SEQ ID NOs:2053, 2054, and 2055, respectively, and (ii) a VL comprising a VL CDR1, VL CDR2, and VL CDR3 having an amino acid sequence of SEQ ID NOs:2056, 2057, and 2058, respectively. In one embodiment, the first antigen binding domain that specifically binds CD8, comprises: (i) a VH comprising a VH CDR1, a VH CDR2, and a VH CDR3 having an amino acid sequence of SEQ ID NOs:2059, 2060, and 2061, respectively, and (ii) a VL comprising a VL CDR1, VL CDR2, and VL CDR3 having an amino acid sequence of SEQ ID NOs:2062, 2063, and 2064, respectively. In one embodiment, the first antigen binding domain that specifically binds CD8, comprises: (i) a VH comprising a VH CDR1, a VH CDR2, and a VH CDR3 having an amino acid sequence of SEQ ID NOs:2065, 2066, and 2067, respectively, and (ii) a VL comprising a VL CDR1, VL CDR2, and VL CDR3 having an amino acid sequence of SEQ ID NOs:2068, 2069, and 2070, respectively. In one embodiment, the first antigen binding domain that specifically binds CD8, comprises: (i) a VH comprising a VH CDR1, a VH CDR2, and a VH CDR3 having an amino acid sequence of a VH CDR1, a VH CDR2, and a VH CDR3, respectively, of a VH having an amino acid sequence of SEQ ID NO:2071; and (ii) a VL comprising a VL CDR1, a VL CDR2, and a VL CDR3 having an amino acid sequence of a VL CDR1, a VL CDR2, and a VL CDR3, respectively, of a VL having an amino acid sequence of SEQ ID NO:2072. In one embodiment, the first antigen binding domain that specifically binds CD8, comprises a VH having an amino acid sequence of SEQ ID NO:2071. In one embodiment, the first antigen binding domain that specifically binds CD8, comprises a VL having an amino acid sequence of SEQ ID NO:2072. In one embodiment, the first antigen binding domain that specifically binds CD8, comprises a VH having an amino acid sequence of SEQ ID NO:2071, and a VL having an amino acid sequence of SEQ ID NO:2072. In one embodiment, the first antigen binding domain that specifically binds CD8, comprises a heavy chain having an amino acid sequence of SEQ ID NO:2073. In one embodiment, the first antigen binding domain that specifically binds CD8, comprises a light chain having an amino acid sequence of SEQ ID NO:2074. In one embodiment, the first antigen binding domain that specifically binds CD8, comprises a heavy chain having an amino acid sequence of SEQ ID NO:2073, and a light chain having an amino acid sequence of SEQ ID NO:2074. In one embodiment, the first antigen binding domain that specifically binds CD8, comprises a VH having an amino acid sequence having at least 95% identity to an amino acid sequence of SEQ ID NO:2071. In one embodiment, the first antigen binding domain that specifically binds CD8, comprises a VL having an amino acid sequence having at least 95% identity to an amino acid sequence of SEQ ID NO:2072. In one embodiment, the first antigen binding domain that specifically binds CD8, comprises a VH having an amino acid sequence having at least 95% identity to an amino acid sequence of SEQ ID NO:2071, and a VL having an amino acid sequence having at least 95% identity to an amino acid sequence of SEQ ID NO:2072. In one embodiment, the first antigen binding domain that specifically binds CD8, comprises a heavy chain having an amino acid sequence having at least 95% identity to an amino acid sequence of SEQ ID NO:2073. In one embodiment, the first antigen binding domain that specifically binds CD8, comprises a light chain having an amino acid sequence having at least 95% identity to an amino acid sequence of SEQ ID NO:2074. In one embodiment, the first antigen binding domain that specifically binds CD8, comprises a heavy chain having an amino acid sequence having at least 95% identity to an amino acid sequence of SEQ ID NO:2073, and a light chain having an amino acid sequence having at least 95% identity to an amino acid sequence of SEQ ID NO:2074.

[0250] In one embodiment, the first antigen binding domain that specifically binds CD8, comprises: (i) a VH comprising a VH CDR1, a VH CDR2, and a VH CDR3 having an amino acid sequence of SEQ ID NOs:2075, 2076, and 2077, respectively, and (ii) a VL comprising a VL CDR1, VL CDR2, and VL CDR3 having an amino acid sequence of SEQ ID NOs:2078, 2079, and 2080, respectively. In one embodiment, the first antigen binding domain that specifically binds CD8, comprises: (i) a VH comprising a VH CDR1, a VH CDR2, and a VH CDR3 having an amino acid sequence of SEQ ID NOs:2081, 2082, and 2083, respectively, and (ii) a VL comprising a VL CDR1, VL CDR2, and VL CDR3 having an amino acid sequence of SEQ ID NOs:2084, 2085, and 2086, respectively. In one embodiment, the first antigen binding domain that specifically binds CD8, comprises: (i) a VH comprising a VH CDR1, a VH CDR2, and a VH CDR3 having an amino acid sequence of SEQ ID NOs:2087, 2088, and 2089, respectively, and (ii) a VL comprising a VL CDR1, VL CDR2, and VL CDR3 having an amino acid sequence of SEQ ID NOs:2090, 2091, and 2092, respectively. In one embodiment, the first antigen binding domain that specifically binds CD8, comprises: (i) a VH comprising a VH CDR1, a VH CDR2, and a VH CDR3 having an amino acid sequence of SEQ ID NOs:2093, 2094, and 2095, respectively, and (ii) a VL comprising a VL CDR1, VL CDR2, and VL CDR3 having an amino acid sequence of SEQ ID NOs:2096, 2097, and 2098, respectively. In one embodiment, the first antigen binding domain that specifically binds CD8, comprises: (i) a VH comprising a VH CDR1, a VH CDR2, and a VH CDR3 having an amino acid sequence of SEQ ID NOs:2099, 2100, and 2101, respectively, and (ii) a VL comprising a VL CDR1, VL CDR2, and VL CDR3 having an amino acid sequence of SEQ ID NOs:2102, 2103, and 2104, respectively. In one embodiment, the first antigen binding domain that specifically binds CD8, comprises: (i) a VH comprising a VH CDR1, a VH CDR2, and a VH CDR3 having an amino acid sequence of a VH CDR1, a VH CDR2, and a VH CDR3, respectively, of a VH having an amino acid sequence of SEQ ID NO:2105; and (ii) a VL comprising a VL CDR1, a VL CDR2, and a VL CDR3 having an amino acid sequence of a VL CDR1, a VL CDR2, and a VL CDR3, respectively, of a VL having an amino acid sequence of SEQ ID NO:2106. In one embodiment, the first antigen binding domain that specifically binds CD8, comprises a VH having an amino acid sequence of SEQ ID NO:2105. In one embodiment, the first antigen binding domain that specifically binds CD8, comprises a VL having an amino acid sequence of SEQ ID NO:2106. In one embodiment, the first antigen binding domain that specifically binds CD8, comprises a VH having an amino acid sequence of SEQ ID NO:2105, and a VL having an amino acid sequence of SEQ ID NO:2106. In one embodiment, the first antigen binding domain that specifically binds CD8, comprises a heavy chain having an amino acid sequence of SEQ ID NO:2107. In one embodiment, the first antigen binding domain that specifically binds CD8, comprises a light chain having an amino acid sequence of SEQ ID NO:2108. In one embodiment, the first antigen binding domain that specifically binds CD8, comprises a heavy chain having an amino acid sequence of SEQ ID NO:2107, and a light chain having an amino acid sequence of SEQ ID NO:2108. In one embodiment, the first antigen binding domain that specifically binds CD8, comprises a VH having an amino acid sequence having at least 95% identity to an amino acid sequence of SEQ ID NO:2105. In one embodiment, the first antigen binding domain that specifically binds CD8, comprises a VL having an amino acid sequence having at least 95% identity to an amino acid sequence of SEQ ID NO:2106. In one embodiment, the first antigen binding domain that specifically binds CD8, comprises a VH having an amino acid sequence having at least 95% identity to an amino acid sequence of SEQ ID NO:2105, and a VL having an amino acid sequence having at least 95% identity to an amino acid sequence of SEQ ID NO:2106. In one embodiment, the first antigen binding domain that specifically binds CD8, comprises a heavy chain having an amino acid sequence having at least 95% identity to an amino acid sequence of SEQ ID NO:2107. In one embodiment, the first antigen binding domain that specifically binds CD8, comprises a light chain having an amino acid sequence having at least 95% identity to an amino acid sequence of SEQ ID NO:2108. In one embodiment, the first antigen binding domain that specifically binds CD8, comprises a heavy chain having an amino acid sequence having at least 95% identity to an amino acid sequence of SEQ ID NO:2107, and a light chain having an amino acid sequence having at least 95% identity to an amino acid sequence of SEQ ID NO:2108.

[0251] In one embodiment, the first antigen binding domain that specifically binds CD8, comprises: (i) a VH comprising a VH CDR1, a VH CDR2, and a VH CDR3 having an amino acid sequence of SEQ ID NOs:2109, 2110, and 2111, respectively, and (ii) a VL comprising a VL CDR1, VL CDR2, and VL CDR3 having an amino acid sequence of SEQ ID NOs:2112, 2113, and 2114, respectively. In one embodiment, the first antigen binding domain that specifically binds CD8, comprises: (i) a VH comprising a VH CDR1, a VH CDR2, and a VH CDR3 having an amino acid sequence of SEQ ID NOs:2115, 2116, and 2117, respectively, and (ii) a VL comprising a VL CDR1, VL CDR2, and VL CDR3 having an amino acid sequence of SEQ ID NOs:2118, 2119, and 2120, respectively. In one embodiment, the first antigen binding domain that specifically binds CD8, comprises: (i) a VH comprising a VH CDR1, a VH CDR2, and a VH CDR3 having an amino acid sequence of SEQ ID NOs:2121, 2122, and 2123, respectively, and (ii) a VL comprising a VL CDR1, VL CDR2, and VL CDR3 having an amino acid sequence of SEQ ID NOs:2124, 2125, and 2126, respectively. In one embodiment, the first antigen binding domain that specifically binds CD8, comprises: (i) a VH comprising a VH CDR1, a VH CDR2, and a VH CDR3 having an amino acid sequence of SEQ ID NOs:2127, 2128, and 2129, respectively, and (ii) a VL comprising a VL CDR1, VL CDR2, and VL CDR3 having an amino acid sequence of SEQ ID NOs:2130, 2131, and 2132, respectively. In one embodiment, the first antigen binding domain that specifically binds CD8, comprises: (i) a VH comprising a VH CDR1, a VH CDR2, and a VH CDR3 having an amino acid sequence of SEQ ID NOs:2133, 2134, and 2135, respectively, and (ii) a VL comprising a VL CDR1, VL CDR2, and VL CDR3 having an amino acid sequence of SEQ ID NOs:2136, 2137, and 2138, respectively. In one embodiment, the first antigen binding domain that specifically binds CD8, comprises: (i) a VH comprising a VH CDR1, a VH CDR2, and a VH CDR3 having an amino acid sequence of a VH CDR1, a VH CDR2, and a VH CDR3, respectively, of a VH having an amino acid sequence of SEQ ID NO:2139; and (ii) a VL comprising a VL CDR1, a VL CDR2, and a VL CDR3 having an amino acid sequence of a VL CDR1, a VL CDR2, and a VL CDR3, respectively, of a VL having an amino acid sequence of SEQ ID NO:2140. In one embodiment, the first antigen binding domain that specifically binds CD8, comprises a VH having an amino acid sequence of SEQ ID NO:2139. In one embodiment, the first antigen binding domain that specifically binds CD8, comprises a VL having an amino acid sequence of SEQ ID NO:2140. In one embodiment, the first antigen binding domain that specifically binds CD8, comprises a VH having an amino acid sequence of SEQ ID NO:2139, and a VL having an amino acid sequence of SEQ ID NO:2140. In one embodiment, the first antigen binding domain that specifically binds CD8, comprises a heavy chain having an amino acid sequence of SEQ ID NO:2141. In one embodiment, the first antigen binding domain that specifically binds CD8, comprises a light chain having an amino acid sequence of SEQ ID NO:2142. In one embodiment, the first antigen binding domain that specifically binds CD8, comprises a heavy chain having an amino acid sequence of SEQ ID NO:2141, and a light chain having an amino acid sequence of SEQ ID NO:2142. In one embodiment, the first antigen binding domain that specifically binds CD8, comprises a VH having an amino acid sequence having at least 95% identity to an amino acid sequence of SEQ ID NO:2139. In one embodiment, the first antigen binding domain that specifically binds CD8, comprises a VL having an amino acid sequence having at least 95% identity to an amino acid sequence of SEQ ID NO:2140. In one embodiment, the first antigen binding domain that specifically binds CD8, comprises a VH having an amino acid sequence having at least 95% identity to an amino acid sequence of SEQ ID NO:2139, and a VL having an amino acid sequence having at least 95% identity to an amino acid sequence of SEQ ID NO:2140. In one embodiment, the first antigen binding domain that specifically binds CD8, comprises a heavy chain having an amino acid sequence having at least 95% identity to an amino acid sequence of SEQ ID NO:2141. In one embodiment, the first antigen binding domain that specifically binds CD8, comprises a light chain having an amino acid sequence having at least 95% identity to an amino acid sequence of SEQ ID NO:2142. In one embodiment, the first antigen binding domain that specifically binds CD8, comprises a heavy chain having an amino acid sequence having at least 95% identity to an amino acid sequence of SEQ ID NO:2141, and a light chain having an amino acid sequence having at least 95% identity to an amino acid sequence of SEQ ID NO:2142.

[0252] In one embodiment, the first antigen binding domain that specifically binds CD8, comprises: (i) a VH comprising a VH CDR1, a VH CDR2, and a VH CDR3 having an amino acid sequence of SEQ ID NOs:2143, 2144, and 2145, respectively, and (ii) a VL comprising a VL CDR1, VL CDR2, and VL CDR3 having an amino acid sequence of SEQ ID NOs:2146, 2147, and 2148, respectively. In one embodiment, the first antigen binding domain that specifically binds CD8, comprises: (i) a VH comprising a VH CDR1, a VH CDR2, and a VH CDR3 having an amino acid sequence of SEQ ID NOs:2149, 2150, and 2151, respectively, and (ii) a VL comprising a VL CDR1, VL CDR2, and VL CDR3 having an amino acid sequence of SEQ ID NOs:2152, 2153, and 2154, respectively. In one embodiment, the first antigen binding domain that specifically binds CD8, comprises: (i) a VH comprising a VH CDR1, a VH CDR2, and a VH CDR3 having an amino acid sequence of SEQ ID NOs:2155, 2156, and 2157, respectively, and (ii) a VL comprising a VL CDR1, VL CDR2, and VL CDR3 having an amino acid sequence of SEQ ID NOs:2158, 2159, and 2160, respectively. In one embodiment, the first antigen binding domain that specifically binds CD8, comprises: (i) a VH comprising a VH CDR1, a VH CDR2, and a VH CDR3 having an amino acid sequence of SEQ ID NOs:2161, 2162, and 2163, respectively, and (ii) a VL comprising a VL CDR1, VL CDR2, and VL CDR3 having an amino acid sequence of SEQ ID NOs:2164, 2165, and 2166, respectively. In one embodiment, the first antigen binding domain that specifically binds CD8, comprises: (i) a VH comprising a VH CDR1, a VH CDR2, and a VH CDR3 having an amino acid sequence of SEQ ID NOs:2167, 2168, and 2169, respectively, and (ii) a VL comprising a VL CDR1, VL CDR2, and VL CDR3 having an amino acid sequence of SEQ ID NOs:2170, 2171, and 2172, respectively. In one embodiment, the first antigen binding domain that specifically binds CD8, comprises: (i) a VH comprising a VH CDR1, a VH CDR2, and a VH CDR3 having an amino acid sequence of a VH CDR1, a VH CDR2, and a VH CDR3, respectively, of a VH having an amino acid sequence of SEQ ID NO:2173; and (ii) a VL comprising a VL CDR1, a VL CDR2, and a VL CDR3 having an amino acid sequence of a VL CDR1, a VL CDR2, and a VL CDR3, respectively, of a VL having an amino acid sequence of SEQ ID NO:2174. In one embodiment, the first antigen binding domain that specifically binds CD8, comprises a VH having an amino acid sequence of SEQ ID NO:2173. In one embodiment, the first antigen binding domain that specifically binds CD8, comprises a VL having an amino acid sequence of SEQ ID NO:2174. In one embodiment, the first antigen binding domain that specifically binds CD8, comprises a VH having an amino acid sequence of SEQ ID NO:2173, and a VL having an amino acid sequence of SEQ ID NO:2174. In one embodiment, the first antigen binding domain that specifically binds CD8, comprises a heavy chain having an amino acid sequence of SEQ ID NO:2175. In one embodiment, the first antigen binding domain that specifically binds CD8, comprises a light chain having an amino acid sequence of SEQ ID NO:2176. In one embodiment, the first antigen binding domain that specifically binds CD8, comprises a heavy chain having an amino acid sequence of SEQ ID NO:2175, and a light chain having an amino acid sequence of SEQ ID NO:2176. In one embodiment, the first antigen binding domain that specifically binds CD8, comprises a VH having an amino acid sequence having at least 95% identity to an amino acid sequence of SEQ ID NO:2173. In one embodiment, the first antigen binding domain that specifically binds CD8, comprises a VL having an amino acid sequence having at least 95% identity to an amino acid sequence of SEQ ID NO:2174. In one embodiment, the first antigen binding domain that specifically binds CD8, comprises a VH having an amino acid sequence having at least 95% identity to an amino acid sequence of SEQ ID NO:2173, and a VL having an amino acid sequence having at least 95% identity to an amino acid sequence of SEQ ID NO:2174. In one embodiment, the first antigen binding domain that specifically binds CD8, comprises a heavy chain having an amino acid sequence having at least 95% identity to an amino acid sequence of SEQ ID NO:2175. In one embodiment, the first antigen binding domain that specifically binds CD8, comprises a light chain having an amino acid sequence having at least 95% identity to an amino acid sequence of SEQ ID NO:2176. In one embodiment, the first antigen binding domain that specifically binds CD8, comprises a heavy chain having an amino acid sequence having at least 95% identity to an amino acid sequence of SEQ ID NO:2175, and a light chain having an amino acid sequence having at least 95% identity to an amino acid sequence of SEQ ID NO:2176.

[0253] In some embodiments, the second antigen binding domain that specifically binds CD3 comprises the HCDR1 of SEQ ID NO: 2291, the HCDR2 of SEQ ID NO: 2292, the HCDR3 of SEQ ID NO: 2293, the LCDR1 of SEQ ID NO: 2294, the LCDR2 of SEQ ID NO: 2295 and the LCDR3 of SEQ ID NO: 2296.

[0254] In some embodiments, the second antigen binding domain that specifically binds CD3 comprises the VH of SEQ ID NO: 2297 and the VL of SEQ ID NO: 2298.

[0255] The disclosure also provides an isolated molecule, comprising: a first antigen binding domain and a second antigen binding domain, wherein the first antigen binding domain specifically binds CD8 and the second antigen binding domain specifically binds CD3. Exemplary first antigen binding domains and second antigen binding domains are provided herein. It is contemplated that an isolated molecule provided herein can comprise any first antigen binding domain specifically binds CD8 provided herein, and any second antigen binding domain specifically binds CD3 provided herein.

[0256] The disclosure also provides an isolated molecule, comprising: a first antigen binding domain, a second antigen binding domain and a third antigen binding domain, wherein the first antigen binding domain specifically binds CD8, the second antigen binding domain specifically binds CD3, and the third antigen binding domain specifically binds a third antigen. It is contemplated that an isolated molecule provided herein can comprise a first antigen binding domain that specifically binds CD8 provided herein, a second antigen binding domain that specifically binds CD3 provided herein, and a third antigen binding domain that specifically binds a third antigen provided herein.

[0257] In some embodiments, the third antigen comprises an antigen expressed by an undesired cell.

[0258] The disclosure also provides an isolated molecule, comprising: a first antigen binding domain, a second antigen binding domain and a third antigen binding domain, wherein the first antigen binding domain specifically binds CD8, the second antigen binding domain specifically binds CD3, and the third antigen binding domain specifically binds an antigen expressed by an undesired cell. Exemplary first antigen binding domains and second antigen binding domains are provided herein. It is contemplated that an isolated molecule provided herein can comprise any first antigen binding domain specifically binds CD8 provided herein, and any second antigen binding domain specifically binds CD3 provided herein.

[0259] The disclosure also provides an isolated molecule, comprising: a first antigen binding domain, a second antigen binding domain and a third antigen binding domain, wherein the first antigen binding domain specifically binds CD8, the second antigen binding domain specifically binds CD3, and the third antigen binding domain specifically binds an antigen expressed by an undesired cell, wherein the isolated molecule activates or recruits CD8⁺ CTLs upon co-engagement of CD3 and CD8. Exemplary first antigen binding domains and second antigen binding domains are provided herein. It is contemplated that an isolated molecule provided herein can comprise any first antigen binding domain specifically binds CD8 provided herein, and any second antigen binding domain specifically binds CD3 provided herein.

[0260] The disclosure also provides an isolated molecule, comprising: a first antigen binding domain, a second antigen binding domain and a third antigen binding domain, wherein the first antigen binding domain specifically binds CD8, the second antigen binding domain specifically binds CD3, and the third antigen binding domain specifically binds an antigen expressed by an undesired cell, wherein the isolated molecule activates or recruits CD8⁺ CTLs upon co-engagement of CD3 and CD8 and is unable to activate or recruit CD8⁺ CTLs in the absence of co-engagement of CD3 and CD8. Exemplary first antigen binding domains and second antigen binding domains are provided herein. It is contemplated that an isolated molecule provided herein can comprise any first antigen binding domain specifically binds CD8 provided herein, and any second antigen binding domain specifically binds CD3 provided herein.

[0261] The disclosure also provides an isolated molecule, comprising: a first antigen binding domain, a second antigen binding domain and a third antigen binding domain, wherein the first antigen binding domain specifically binds CD8, the second antigen binding domain specifically binds CD3 and the third antigen binding domain specifically binds an antigen expressed by an undesired cell, wherein the first antigen binding domain specifically binds CD8 and the second antigen binding domain specifically binds CD3 with affinities that result in activation or recruitment of CD8⁺ CTLs only upon co-engagement of CD3 and CD8. Exemplary first antigen binding domains and second antigen binding domains are provided herein. It is contemplated that an isolated molecule provided herein can comprise any first antigen binding domain specifically binds CD8 provided herein, and any second antigen binding domain specifically binds CD3 provided herein.

[0262] The disclosure also provides an isolated multispecific antibody, comprising: a first antigen binding domain and a second antigen binding domain, wherein the first antigen binding domain specifically binds CD8 and the second antigen binding domain specifically binds CD3. Exemplary first antigen binding domains and second antigen binding domains are provided herein. It is contemplated that an isolated multispecific antibody provided herein can comprise any first antigen binding domain specifically binds CD8 provided herein, and any second antigen binding domain specifically binds CD3 provided herein.

[0263] The disclosure also provides an isolated multispecific antibody, comprising: a first half molecule and a second half molecule, wherein the first half molecule comprises a first antigen binding domain and a second antigen binding domain and the second half molecule comprises a third antigen binding domain, wherein the first antigen binding domain specifically binds CD8, the second antigen binding domain specifically binds CD3, and the third antigen binding domain specifically binds a third antigen. Exemplary first antigen binding domains and second antigen binding domains are provided herein. It is contemplated that an isolated multispecific antibody provided herein can comprise a first antigen binding domain that specifically binds CD8 provided herein, a second antigen binding domain that specifically binds CD3 provided herein, and a third antigen binding domain that specifically binds a third antigen provided herein.

[0264] In some embodiments, the third antigen comprises an antigen expressed by an undesired cell.

[0265] The disclosure also provides an isolated multispecific antibody, comprising: a first half molecule and a second half molecule, wherein the first half molecule comprises a first antigen binding domain and a second antigen binding domain and the second half molecule comprises a third antigen binding domain, wherein the first antigen binding domain specifically binds CD8, the second antigen binding domain specifically binds CD3, and the third antigen binding domain specifically binds an antigen expressed by an undesired cell. Exemplary first antigen binding domains and second antigen binding domains are provided herein. It is contemplated that an isolated multispecific antibody provided herein can comprise a first antigen binding domain that specifically binds CD8 provided herein, a second antigen binding domain that specifically binds CD3 provided herein, and a third antigen binding domain that specifically binds a third antigen provided herein.

[0266] The disclosure also provides an isolated multispecific antibody, comprising: a first half molecule and a second half molecule, wherein the first half molecule comprises a first antigen binding domain and a second antigen binding domain and the second half molecule comprises a third antigen binding domain, wherein the first antigen binding domain specifically binds CD8, the second antigen binding domain specifically binds CD3, and the third antigen binding domain specifically binds an antigen expressed by an undesired cell, wherein the isolated multispecific antibody activates or recruits CD8⁺ CTLs upon co-engagement of CD3 and CD8. Exemplary first antigen binding domains and second antigen binding domains are provided herein. It is contemplated that an isolated multispecific antibody provided herein can comprise a first antigen binding domain that specifically binds CD8 provided herein, a second antigen binding domain that specifically binds CD3 provided herein, and a third antigen binding domain that specifically binds a third antigen provided herein.

[0267] The disclosure also provides an isolated multispecific antibody, comprising: a first half molecule and a second half molecule, wherein the first half molecule comprises a first antigen binding domain and a second antigen binding domain and the second half molecule comprises a third antigen binding domain, wherein the first antigen binding domain specifically binds CD8, the second antigen binding domain specifically binds CD3, and the third antigen binding domain specifically binds an antigen expressed by an undesired cell, wherein the isolated multispecific antibody activates or recruits CD8⁺ CTLs upon co-engagement of CD3 and CD8 and wherein the isolated multispecific antibody is unable to activate or recruit CD8⁺ CTLs in the absence of co-engagement of CD3 and CD8. Exemplary first antigen binding domains and second antigen binding domains are provided herein. It is contemplated that an isolated multispecific antibody provided herein can comprise a first antigen binding domain that specifically binds CD8 provided herein, a second antigen binding domain that specifically binds CD3 provided herein, and a third antigen binding domain that specifically binds a third antigen provided herein.

[0268] The disclosure also provides an isolated multispecific antibody, comprising: a first half molecule and a second half molecule, wherein the first half molecule comprises a first antigen binding domain and a second antigen binding domain and the second half molecule comprises a third antigen binding domain, wherein the first antigen binding domain specifically binds CD8, the second antigen binding domain specifically binds CD3, and the third antigen binding domain specifically binds an antigen expressed by an undesired cell, wherein the first antigen binding domain specifically binds CD8 and the second antigen binding domain specifically binds CD3 with affinities that result in activation or recruitment of CD8⁺ CTLs only upon co-engagement of CD3 and CD8. Exemplary first antigen binding domains and second antigen binding domains are provided herein. It is contemplated that an isolated multispecific antibody provided herein can comprise a first antigen binding domain that specifically binds CD8 provided herein, a second antigen binding domain that specifically binds CD3 provided herein, and a third antigen binding domain that specifically binds a third antigen provided herein.

[0269] The disclosure also provides an isolated molecule, comprising: a first antigen binding domain and a second antigen binding domain, wherein the first antigen binding domain specifically binds CD8 and the second antigen binding domain specifically binds CD3, wherein the second antigen binding domain that specifically binds CD3 comprises the HCDR1 of SEQ ID NO: 2291, the HCDR2 of SEQ ID NO: 2292, the HCDR3 of SEQ ID NO: 2293, the LCDR1 of SEQ ID NO: 2294, the LCDR2 of SEQ ID NO: 2295 and the LCDR3 of SEQ ID NO: 2296. In certain embodiments, the isolated molecule comprises a first antigen binding domain that specifically binds CD8 provided herein.

[0270] The disclosure also provides an isolated molecule, comprising: a first antigen binding domain, a second antigen binding domain and a third antigen binding domain, wherein the first antigen binding domain specifically binds CD8, the second antigen binding domain specifically binds CD3, and the third antigen binding domain specifically binds a third antigen, wherein the second antigen binding domain that specifically binds CD3 comprises the HCDR1 of SEQ ID NO: 2291, the HCDR2 of SEQ ID NO: 2292, the HCDR3 of SEQ ID NO: 2293, the LCDR1 of SEQ ID NO: 2294, the LCDR2 of SEQ ID NO: 2295 and the LCDR3 of SEQ ID NO: 2296. In certain embodiments, the isolated molecule comprises a first antigen binding domain that specifically binds CD8 provided herein.

[0271] The disclosure also provides an isolated molecule, comprising: a first antigen binding domain, a second antigen binding domain and a third antigen binding domain, wherein the first antigen binding domain specifically binds CD8, the second antigen binding domain specifically binds CD3, and the third antigen binding domain specifically binds an antigen expressed by an undesired cell, wherein the second antigen binding domain that specifically binds CD3 comprises the HCDR1 of SEQ ID NO: 2291, the HCDR2 of SEQ ID NO: 2292, the HCDR3 of SEQ ID NO: 2293, the LCDR1 of SEQ ID NO: 2294, the LCDR2 of SEQ ID NO: 2295 and the LCDR3 of SEQ ID NO: 2296. In certain embodiments, the isolated molecule comprises a first antigen binding domain that specifically binds CD8 provided herein.

[0272] The disclosure also provides an isolated molecule, comprising: a first antigen binding domain, a second antigen binding domain and a third antigen binding domain, wherein the first antigen binding domain specifically binds CD8, the second antigen binding domain specifically binds CD3, and the third antigen binding domain specifically binds an antigen expressed by an undesired cell, wherein the isolated molecule activates or recruits CD8⁺ CTLs upon co-engagement of CD3 and CD8, wherein the second antigen binding domain that specifically binds CD3 comprises the HCDR1 of SEQ ID NO: 2291, the HCDR2 of SEQ ID NO: 2292, the HCDR3 of SEQ ID NO: 2293, the LCDR1 of SEQ ID NO: 2294, the LCDR2 of SEQ ID NO: 2295 and the LCDR3 of SEQ ID NO: 2296. In certain embodiments, the isolated molecule comprises a first antigen binding domain that specifically binds CD8 provided herein.

[0273] The disclosure also provides an isolated molecule, comprising: a first antigen binding domain, a second antigen binding domain and a third antigen binding domain, wherein the first antigen binding domain specifically binds CD8, the second antigen binding domain specifically binds CD3, and the third antigen binding domain specifically binds an antigen expressed by an undesired cell, wherein the isolated molecule activates or recruits CD8⁺ CTLs upon co-engagement of CD3 and CD8 and is unable to activate or recruit CD8⁺ CTLs in the absence of co-engagement of CD3 and CD8, wherein the second antigen binding domain that specifically binds CD3 comprises the HCDR1 of SEQ ID NO: 2291, the HCDR2 of SEQ ID NO: 2292, the HCDR3 of SEQ ID NO: 2293, the LCDR1 of SEQ ID NO: 2294, the LCDR2 of SEQ ID NO: 2295 and the LCDR3 of SEQ ID NO: 2296. In certain embodiments, the isolated molecule comprises a first antigen binding domain that specifically binds CD8 provided herein.

[0274] The disclosure also provides an isolated molecule, comprising: a first antigen binding domain, a second antigen binding domain and a third antigen binding domain, wherein the first antigen binding domain specifically binds CD8, the second antigen binding domain specifically binds CD3 and the third antigen binding domain specifically binds an antigen expressed by an undesired cell, wherein the first antigen binding domain specifically binds CD8 and the second antigen binding domain specifically binds CD3 with affinities that result in activation or recruitment of CD8⁺ CTLs only upon co-engagement of CD3 and CD8, wherein the second antigen binding domain that specifically binds CD3 comprises the HCDR1 of SEQ ID NO: 2291, the HCDR2 of SEQ ID NO: 2292, the HCDR3 of SEQ ID NO: 2293, the LCDR1 of SEQ ID NO: 2294, the LCDR2 of SEQ ID NO: 2295 and the LCDR3 of SEQ ID NO: 2296. In certain embodiments, the isolated molecule comprises a first antigen binding domain that specifically binds CD8 provided herein.

[0275] The disclosure also provides an isolated multispecific antibody, comprising: a first antigen binding domain and a second antigen binding domain, wherein the first antigen binding domain specifically binds CD8 and the second antigen binding domain specifically binds CD3, wherein the second antigen binding domain that specifically binds CD3 comprises the HCDR1 of SEQ ID NO: 2291, the HCDR2 of SEQ ID NO: 2292, the HCDR3 of SEQ ID NO: 2293, the LCDR1 of SEQ ID NO: 2294, the LCDR2 of SEQ ID NO: 2295 and the LCDR3 of SEQ ID NO: 2296. In certain embodiments, the isolated multispecific antibody comprises a first antigen binding domain that specifically binds CD8 provided herein.

[0276] The disclosure also provides an isolated multispecific antibody, comprising: a first half molecule and a second half molecule, wherein the first half molecule comprises a first antigen binding domain and a second antigen binding domain and the second half molecule comprises a third antigen binding domain, wherein the first antigen binding domain specifically binds CD8, the second antigen binding domain specifically binds CD3, and the third antigen binding domain specifically binds a third antigen, wherein the second antigen binding domain that specifically binds CD3 comprises the HCDR1 of SEQ ID NO: 2291, the HCDR2 of SEQ ID NO: 2292, the HCDR3 of SEQ ID NO: 2293, the LCDR1 of SEQ ID NO: 2294, the LCDR2 of SEQ ID NO: 2295 and the LCDR3 of SEQ ID NO: 2296. In certain embodiments, the isolated multispecific antibody comprises a first antigen binding domain that specifically binds CD8 provided herein.

[0277] The disclosure also provides an isolated multispecific antibody, comprising: a first half molecule and a second half molecule, wherein the first half molecule comprises a first antigen binding domain and a second antigen binding domain and the second half molecule comprises a third antigen binding domain, wherein the first antigen binding domain specifically binds CD8, the second antigen binding domain specifically binds CD3, and the third antigen binding domain specifically binds an antigen expressed by an undesired cell, wherein the second antigen binding domain that specifically binds CD3 comprises the HCDR1 of SEQ ID NO: 2291, the HCDR2 of SEQ ID NO: 2292, the HCDR3 of SEQ ID NO: 2293, the LCDR1 of SEQ ID NO: 2294, the LCDR2 of SEQ ID NO: 2295 and the LCDR3 of SEQ ID NO: 2296. In certain embodiments, the isolated multispecific antibody comprises a first antigen binding domain that specifically binds CD8 provided herein.

[0278] The disclosure also provides an isolated multispecific antibody, comprising: a first half molecule and a second half molecule, wherein the first half molecule comprises a first antigen binding domain and a second antigen binding domain and the second half molecule comprises a third antigen binding domain, wherein the first antigen binding domain specifically binds CD8, the second antigen binding domain specifically binds CD3, and the third antigen binding domain specifically binds an antigen expressed by an undesired cell, wherein the isolated multispecific antibody activates or recruits CD8⁺ CTLs upon co-engagement of CD3 and CD8, wherein the second antigen binding domain that specifically binds CD3 comprises the HCDR1 of SEQ ID NO: 2291, the HCDR2 of SEQ ID NO: 2292, the HCDR3 of SEQ ID NO: 2293, the LCDR1 of SEQ ID NO: 2294, the LCDR2 of SEQ ID NO: 2295 and the LCDR3 of SEQ ID NO: 2296. In certain embodiments, the isolated multispecific antibody comprises a first antigen binding domain that specifically binds CD8 provided herein.

[0279] The disclosure also provides an isolated multispecific antibody, comprising: a first half molecule and a second half molecule, wherein the first half molecule comprises a first antigen binding domain and a second antigen binding domain and the second half molecule comprises a third antigen binding domain, wherein the first antigen binding domain specifically binds CD8, the second antigen binding domain specifically binds CD3, and the third antigen binding domain specifically binds an antigen expressed by an undesired cell, wherein the isolated multispecific antibody activates or recruits CD8⁺ CTLs upon co-engagement of CD3 and CD8 and wherein the isolated multispecific antibody is unable to activate or recruit CD8⁺ CTLs in the absence of co-engagement of CD3 and CD8, wherein the second antigen binding domain that specifically binds CD3 comprises the HCDR1 of SEQ ID NO: 2291, the HCDR2 of SEQ ID NO: 2292, the HCDR3 of SEQ ID NO: 2293, the LCDR1 of SEQ ID NO: 2294, the LCDR2 of SEQ ID NO: 2295 and the LCDR3 of SEQ ID NO: 2296. In certain embodiments, the isolated multispecific antibody comprises a first antigen binding domain that specifically binds CD8 provided herein.

[0280] The disclosure also provides an isolated multispecific antibody, comprising: a first half molecule and a second half molecule, wherein the first half molecule comprises a first antigen binding domain and a second antigen binding domain and the second half molecule comprises a third antigen binding domain, wherein the first antigen binding domain specifically binds CD8, the second antigen binding domain specifically binds CD3, and the third antigen binding domain specifically binds an antigen expressed by an undesired cell, wherein the first antigen binding domain specifically binds CD8 and the second antigen binding domain specifically binds CD3 with affinities that result in activation or recruitment of CD8⁺ CTLs only upon co-engagement of CD3 and CD8, wherein the second antigen binding domain that specifically binds CD3 comprises the HCDR1 of SEQ ID NO: 2291, the HCDR2 of SEQ ID NO: 2292, the HCDR3 of SEQ ID NO: 2293, the LCDR1 of SEQ ID NO: 2294, the LCDR2 of SEQ ID NO: 2295 and the LCDR3 of SEQ ID NO: 2296. In certain embodiments, the isolated multispecific antibody comprises a first antigen binding domain that specifically binds CD8 provided herein.

[0281] The disclosure also provides an isolated molecule, comprising: a first antigen binding domain and a second antigen binding domain, wherein the first antigen binding domain specifically binds CD8 and the second antigen binding domain specifically binds CD3, wherein the second antigen binding domain that specifically binds CD3 comprises the VH of SEQ ID NO: 2297 and the VL of SEQ ID NO: 2298. In certain embodiments, the isolated molecule comprises a first antigen binding domain that specifically binds CD8 provided herein.

[0282] The disclosure also provides an isolated molecule, comprising: a first antigen binding domain, a second antigen binding domain and a third antigen binding domain, wherein the first antigen binding domain specifically binds CD8, the second antigen binding domain specifically binds CD3, and the third antigen binding domain specifically binds a third antigen, wherein the second antigen binding domain that specifically binds CD3 comprises the VH of SEQ ID NO: 2297 and the VL of SEQ ID NO: 2298. In certain embodiments, the isolated molecule comprises a first antigen binding domain that specifically binds CD8 provided herein.

[0283] The disclosure also provides an isolated molecule, comprising: a first antigen binding domain, a second antigen binding domain and a third antigen binding domain, wherein the first antigen binding domain specifically binds CD8, the second antigen binding domain specifically binds CD3, and the third antigen binding domain specifically binds an antigen expressed by an undesired cell, wherein the second antigen binding domain that specifically binds CD3 comprises the VH of SEQ ID NO: 2297 and the VL of SEQ ID NO: 2298. In certain embodiments, the isolated molecule comprises a first antigen binding domain that specifically binds CD8 provided herein.

[0284] The disclosure also provides an isolated molecule, comprising: a first antigen binding domain, a second antigen binding domain and a third antigen binding domain, wherein the first antigen binding domain specifically binds CD8, the second antigen binding domain specifically binds CD3, and the third antigen binding domain specifically binds an antigen expressed by an undesired cell, wherein the isolated molecule activates or recruits CD8⁺ CTLs upon co-engagement of CD3 and CD8, wherein the second antigen binding domain that specifically binds CD3 comprises the VH of SEQ ID NO: 2297 and the VL of SEQ ID NO: 2298. In certain embodiments, the isolated molecule comprises a first antigen binding domain that specifically binds CD8 provided herein.

[0285] The disclosure also provides an isolated molecule, comprising: a first antigen binding domain, a second antigen binding domain and a third antigen binding domain, wherein the first antigen binding domain specifically binds CD8, the second antigen binding domain specifically binds CD3, and the third antigen binding domain specifically binds an antigen expressed by an undesired cell, wherein the isolated molecule activates or recruits CD8⁺ CTLs upon co-engagement of CD3 and CD8 and is unable to activate or recruit CD8⁺ CTLs in the absence of co-engagement of CD3 and CD8, wherein the second antigen binding domain that specifically binds CD3 comprises the VH of SEQ ID NO: 2297 and the VL of SEQ ID NO: 2298. In certain embodiments, the isolated molecule comprises a first antigen binding domain that specifically binds CD8 provided herein.

[0286] The disclosure also provides an isolated molecule, comprising: a first antigen binding domain, a second antigen binding domain and a third antigen binding domain, wherein the first antigen binding domain specifically binds CD8, the second antigen binding domain specifically binds CD3 and the third antigen binding domain specifically binds an antigen expressed by an undesired cell, wherein the first antigen binding domain specifically binds CD8 and the second antigen binding domain specifically binds CD3 with affinities that result in activation or recruitment of CD8⁺ CTLs only upon co-engagement of CD3 and CD8, wherein the second antigen binding domain that specifically binds CD3 comprises the VH of SEQ ID NO: 2297 and the VL of SEQ ID NO: 2298. In certain embodiments, the isolated molecule comprises a first antigen binding domain that specifically binds CD8 provided herein.

[0287] The disclosure also provides an isolated multispecific antibody, comprising: a first antigen binding domain and a second antigen binding domain, wherein the first antigen binding domain specifically binds CD8 and the second antigen binding domain specifically binds CD3, wherein the second antigen binding domain that specifically binds CD3 comprises the VH of SEQ ID NO: 2297 and the VL of SEQ ID NO: 2298. In certain embodiments, the isolated multispecific antibody comprises a first antigen binding domain that specifically binds CD8 provided herein.

[0288] The disclosure also provides an isolated multispecific antibody, comprising: a first half molecule and a second half molecule, wherein the first half molecule comprises a first antigen binding domain and a second antigen binding domain and the second half molecule comprises a third antigen binding domain, wherein the first antigen binding domain specifically binds CD8, the second antigen binding domain specifically binds CD3, and the third antigen binding domain specifically binds a third antigen, wherein the second antigen binding domain that specifically binds CD3 comprises the VH of SEQ ID NO: 2297 and the VL of SEQ ID NO: 2298. In certain embodiments, the isolated multispecific antibody comprises a first antigen binding domain that specifically binds CD8 provided herein.

[0289] The disclosure also provides an isolated multispecific antibody, comprising: a first half molecule and a second half molecule, wherein the first half molecule comprises a first antigen binding domain and a second antigen binding domain and the second half molecule comprises a third antigen binding domain, wherein the first antigen binding domain specifically binds CD8, the second antigen binding domain specifically binds CD3, and the third antigen binding domain specifically binds an antigen expressed by an undesired cell, wherein the second antigen binding domain that specifically binds CD3 comprises the VH of SEQ ID NO: 2297 and the VL of SEQ ID NO: 2298. In certain embodiments, the isolated multispecific antibody comprises a first antigen binding domain that specifically binds CD8 provided herein.

[0290] The disclosure also provides an isolated multispecific antibody, comprising: a first half molecule and a second half molecule, wherein the first half molecule comprises a first antigen binding domain and a second antigen binding domain and the second half molecule comprises a third antigen binding domain, wherein the first antigen binding domain specifically binds CD8, the second antigen binding domain specifically binds CD3, and the third antigen binding domain specifically binds an antigen expressed by an undesired cell, wherein the isolated multispecific antibody activates or recruits CD8⁺ CTLs upon co-engagement of CD3 and CD8, wherein the second antigen binding domain that specifically binds CD3 comprises the VH of SEQ ID NO: 2297 and the VL of SEQ ID NO: 2298. In certain embodiments, the isolated multispecific antibody comprises a first antigen binding domain that specifically binds CD8 provided herein.

[0291] The disclosure also provides an isolated multispecific antibody, comprising: a first half molecule and a second half molecule, wherein the first half molecule comprises a first antigen binding domain and a second antigen binding domain and the second half molecule comprises a third antigen binding domain, wherein the first antigen binding domain specifically binds CD8, the second antigen binding domain specifically binds CD3, and the third antigen binding domain specifically binds an antigen expressed by an undesired cell, wherein the isolated multispecific antibody activates or recruits CD8⁺ CTLs upon co-engagement of CD3 and CD8 and wherein the isolated multispecific antibody is unable to activate or recruit CD8⁺ CTLs in the absence of co-engagement of CD3 and CD8, wherein the second antigen binding domain that specifically binds CD3 comprises the VH of SEQ ID NO: 2297 and the VL of SEQ ID NO: 2298. In certain embodiments, the isolated multispecific antibody comprises a first antigen binding domain that specifically binds CD8 provided herein.

[0292] The disclosure also provides an isolated multispecific antibody, comprising: a first half molecule and a second half molecule, wherein the first half molecule comprises a first antigen binding domain and a second antigen binding domain and the second half molecule comprises a third antigen binding domain, wherein the first antigen binding domain specifically binds CD8, the second antigen binding domain specifically binds CD3, and the third antigen binding domain specifically binds an antigen expressed by an undesired cell, wherein the first antigen binding domain specifically binds CD8 and the second antigen binding domain specifically binds CD3 with affinities that result in activation or recruitment of CD8⁺ CTLs only upon co-engagement of CD3 and CD8, wherein the second antigen binding domain that specifically binds CD3 comprises the VH of SEQ ID NO: 2297 and the VL of SEQ ID NO: 2298. In certain embodiments, the isolated multispecific antibody comprises a first antigen binding domain that specifically binds CD8 provided herein.

[0293] The disclosure also provides an isolated molecule, comprising: a first antigen binding domain and a second antigen binding domain, wherein the first antigen binding domain specifically binds CD8 and the second antigen binding domain specifically binds CD3, wherein the first antigen binding domain that specifically binds CD8 comprises the HCDR1 of SEQ ID NO: 2307, the HCDR2 of SEQ ID NO: 2308, the HCDR3 of SEQ ID NO: 2309, the LCDR1 of SEQ ID NO: 2310, the LCDR2 of SEQ ID NO: 2311 and the LCDR3 of SEQ ID NO: 2312.

[0294] The disclosure also provides an isolated molecule, comprising: a first antigen binding domain, a second antigen binding domain and a third antigen binding domain, wherein the first antigen binding domain specifically binds CD8, the second antigen binding domain specifically binds CD3, and the third antigen binding domain specifically binds a third antigen, wherein the first antigen binding domain that specifically binds CD8 comprises the HCDR1 of SEQ ID NO: 2307, the HCDR2 of SEQ ID NO: 2308, the HCDR3 of SEQ ID NO: 2309, the LCDR1 of SEQ ID NO: 2310, the LCDR2 of SEQ ID NO: 2311 and the LCDR3 of SEQ ID NO: 2312.

[0295] The disclosure also provides an isolated molecule, comprising: a first antigen binding domain, a second antigen binding domain and a third antigen binding domain, wherein the first antigen binding domain specifically binds CD8, the second antigen binding domain specifically binds CD3, and the third antigen binding domain specifically binds an antigen expressed by an undesired cell, wherein the first antigen binding domain that specifically binds CD8 comprises the HCDR1 of SEQ ID NO: 2307, the HCDR2 of SEQ ID NO: 2308, the HCDR3 of SEQ ID NO: 2309, the LCDR1 of SEQ ID NO: 2310, the LCDR2 of SEQ ID NO: 2311 and the LCDR3 of SEQ ID NO: 2312.

[0296] The disclosure also provides an isolated molecule, comprising: a first antigen binding domain, a second antigen binding domain and a third antigen binding domain, wherein the first antigen binding domain specifically binds CD8, the second antigen binding domain specifically binds CD3, and the third antigen binding domain specifically binds an antigen expressed by an undesired cell, wherein the isolated molecule activates or recruits CD8⁺ CTLs upon co-engagement of CD3 and CD8, wherein the first antigen binding domain that specifically binds CD8 comprises the HCDR1 of SEQ ID NO: 2307, the HCDR2 of SEQ ID NO: 2308, the HCDR3 of SEQ ID NO: 2309, the LCDR1 of SEQ ID NO: 2310, the LCDR2 of SEQ ID NO: 2311 and the LCDR3 of SEQ ID NO: 2312.

[0297] The disclosure also provides an isolated molecule, comprising: a first antigen binding domain, a second antigen binding domain and a third antigen binding domain, wherein the first antigen binding domain specifically binds CD8, the second antigen binding domain specifically binds CD3, and the third antigen binding domain specifically binds an antigen expressed by an undesired cell, wherein the isolated molecule activates or recruits CD8⁺ CTLs upon co-engagement of CD3 and CD8 and is unable to activate or recruit CD8⁺ CTLs in the absence of co-engagement of CD3 and CD8, wherein the first antigen binding domain that specifically binds CD8 comprises the HCDR1 of SEQ ID NO: 2307, the HCDR2 of SEQ ID NO: 2308, the HCDR3 of SEQ ID NO: 2309, the LCDR1 of SEQ ID NO: 2310, the LCDR2 of SEQ ID NO: 2311 and the LCDR3 of SEQ ID NO: 2312.

[0298] The disclosure also provides an isolated molecule, comprising: a first antigen binding domain, a second antigen binding domain and a third antigen binding domain, wherein the first antigen binding domain specifically binds CD8, the second antigen binding domain specifically binds CD3 and the third antigen binding domain specifically binds an antigen expressed by an undesired cell, wherein the first antigen binding domain specifically binds CD8 and the second antigen binding domain specifically binds CD3 with affinities that result in activation or recruitment of CD8⁺ CTLs only upon co-engagement of CD3 and CD8, wherein the first antigen binding domain that specifically binds CD8 comprises the HCDR1 of SEQ ID NO: 2307, the HCDR2 of SEQ ID NO: 2308, the HCDR3 of SEQ ID NO: 2309, the LCDR1 of SEQ ID NO: 2310, the LCDR2 of SEQ ID NO: 2311 and the LCDR3 of SEQ ID NO: 2312.

[0299] The disclosure also provides an isolated multispecific antibody, comprising: a first antigen binding domain and a second antigen binding domain, wherein the first antigen binding domain specifically binds CD8 and the second antigen binding domain specifically binds CD3, wherein the first antigen binding domain that specifically binds CD8 comprises the HCDR1 of SEQ ID NO: 2307, the HCDR2 of SEQ ID NO: 2308, the HCDR3 of SEQ ID NO: 2309, the LCDR1 of SEQ ID NO: 2310, the LCDR2 of SEQ ID NO: 2311 and the LCDR3 of SEQ ID NO: 2312.

[0300] The disclosure also provides an isolated multispecific antibody, comprising: a first half molecule and a second half molecule, wherein the first half molecule comprises a first antigen binding domain and a second antigen binding domain and the second half molecule comprises a third antigen binding domain, wherein the first antigen binding domain specifically binds CD8, the second antigen binding domain specifically binds CD3, and the third antigen binding domain specifically binds a third antigen, wherein the first antigen binding domain that specifically binds CD8 comprises the HCDR1 of SEQ ID NO: 2307, the HCDR2 of SEQ ID NO: 2308, the HCDR3 of SEQ ID NO: 2309, the LCDR1 of SEQ ID NO: 2310, the LCDR2 of SEQ ID NO: 2311 and the LCDR3 of SEQ ID NO: 2312.

[0301] The disclosure also provides an isolated multispecific antibody, comprising: a first half molecule and a second half molecule, wherein the first half molecule comprises a first antigen binding domain and a second antigen binding domain and the second half molecule comprises a third antigen binding domain, wherein the first antigen binding domain specifically binds CD8, the second antigen binding domain specifically binds CD3, and the third antigen binding domain specifically binds an antigen expressed by an undesired cell, wherein the first antigen binding domain that specifically binds CD8 comprises the HCDR1 of SEQ ID NO: 2307, the HCDR2 of SEQ ID NO: 2308, the HCDR3 of SEQ ID NO: 2309, the LCDR1 of SEQ ID NO: 2310, the LCDR2 of SEQ ID NO: 2311 and the LCDR3 of SEQ ID NO: 2312.

[0302] The disclosure also provides an isolated multispecific antibody, comprising: a first half molecule and a second half molecule, wherein the first half molecule comprises a first antigen binding domain and a second antigen binding domain and the second half molecule comprises a third antigen binding domain, wherein the first antigen binding domain specifically binds CD8, the second antigen binding domain specifically binds CD3, and the third antigen binding domain specifically binds an antigen expressed by an undesired cell, wherein the isolated multispecific antibody activates or recruits CD8⁺ CTLs upon co-engagement of CD3 and CD8, wherein the first antigen binding domain that specifically binds CD8 comprises the HCDR1 of SEQ ID NO: 2307, the HCDR2 of SEQ ID NO: 2308, the HCDR3 of SEQ ID NO: 2309, the LCDR1 of SEQ ID NO: 2310, the LCDR2 of SEQ ID NO: 2311 and the LCDR3 of SEQ ID NO: 2312.

[0303] The disclosure also provides an isolated multispecific antibody, comprising: a first half molecule and a second half molecule, wherein the first half molecule comprises a first antigen binding domain and a second antigen binding domain and the second half molecule comprises a third antigen binding domain, wherein the first antigen binding domain specifically binds CD8, the second antigen binding domain specifically binds CD3, and the third antigen binding domain specifically binds an antigen expressed by an undesired cell, wherein the isolated multispecific antibody activates or recruits CD8⁺ CTLs upon co-engagement of CD3 and CD8 and wherein the isolated multispecific antibody is unable to activate or recruit CD8⁺ CTLs in the absence of co-engagement of CD3 and CD8, wherein the first antigen binding domain that specifically binds CD8 comprises the HCDR1 of SEQ ID NO: 2307, the HCDR2 of SEQ ID NO: 2308, the HCDR3 of SEQ ID NO: 2309, the LCDR1 of SEQ ID NO: 2310, the LCDR2 of SEQ ID NO: 2311 and the LCDR3 of SEQ ID NO: 2312.

[0304] The disclosure also provides an isolated multispecific antibody, comprising: a first half molecule and a second half molecule, wherein the first half molecule comprises a first antigen binding domain and a second antigen binding domain and the second half molecule comprises a third antigen binding domain, wherein the first antigen binding domain specifically binds CD8, the second antigen binding domain specifically binds CD3, and the third antigen binding domain specifically binds an antigen expressed by an undesired cell, wherein the first antigen binding domain specifically binds CD8 and the second antigen binding domain specifically binds CD3 with affinities that result in activation or recruitment of CD8⁺ CTLs only upon co-engagement of CD3 and CD8, wherein the first antigen binding domain that specifically binds CD8 comprises the HCDR1 of SEQ ID NO: 2307, the HCDR2 of SEQ ID NO: 2308, the HCDR3 of SEQ ID NO: 2309, the LCDR1 of SEQ ID NO: 2310, the LCDR2 of SEQ ID NO: 2311 and the LCDR3 of SEQ ID NO: 2312.

[0305] The disclosure also provides an isolated molecule, comprising: a first antigen binding domain and a second antigen binding domain, wherein the first antigen binding domain specifically binds CD8 and the second antigen binding domain specifically binds CD3, wherein the first antigen binding domain that specifically binds CD8 comprises the HCDR1 of SEQ ID NO: 2307, the HCDR2 of SEQ ID NO: 2308, the HCDR3 of SEQ ID NO: 2309, the LCDR1 of SEQ ID NO: 2310, the LCDR2 of SEQ ID NO: 2311 and the LCDR3 of SEQ ID NO: 2312, and the second antigen binding domain that specifically binds CD3 comprises the HCDR1 of SEQ ID NO: 2291, the HCDR2 of SEQ ID NO: 2292, the HCDR3 of SEQ ID NO: 2293, the LCDR1 of SEQ ID NO: 2294, the LCDR2 of SEQ ID NO: 2295 and the LCDR3 of SEQ ID NO: 2296.

[0306] The disclosure also provides an isolated molecule, comprising: a first antigen binding domain, a second antigen binding domain and a third antigen binding domain, wherein the first antigen binding domain specifically binds CD8, the second antigen binding domain specifically binds CD3, and the third antigen binding domain specifically binds a third antigen, wherein the first antigen binding domain that specifically binds CD8 comprises the HCDR1 of SEQ ID NO: 2307, the HCDR2 of SEQ ID NO: 2308, the HCDR3 of SEQ ID NO: 2309, the LCDR1 of SEQ ID NO: 2310, the LCDR2 of SEQ ID NO: 2311 and the LCDR3 of SEQ ID NO: 2312, and the second antigen binding domain that specifically binds CD3 comprises the HCDR1 of SEQ ID NO: 2291, the HCDR2 of SEQ ID NO: 2292, the HCDR3 of SEQ ID NO: 2293, the LCDR1 of SEQ ID NO: 2294, the LCDR2 of SEQ ID NO: 2295 and the LCDR3 of SEQ ID NO: 2296.

[0307] The disclosure also provides an isolated molecule, comprising: a first antigen binding domain, a second antigen binding domain and a third antigen binding domain, wherein the first antigen binding domain specifically binds CD8, the second antigen binding domain specifically binds CD3, and the third antigen binding domain specifically binds an antigen expressed by an undesired cell, wherein the first antigen binding domain that specifically binds CD8 comprises the HCDR1 of SEQ ID NO: 2307, the HCDR2 of SEQ ID NO: 2308, the HCDR3 of SEQ ID NO: 2309, the LCDR1 of SEQ ID NO: 2310, the LCDR2 of SEQ ID NO: 2311 and the LCDR3 of SEQ ID NO: 2312, and the second antigen binding domain that specifically binds CD3 comprises the HCDR1 of SEQ ID NO: 2291, the HCDR2 of SEQ ID NO: 2292, the HCDR3 of SEQ ID NO: 2293, the LCDR1 of SEQ ID NO: 2294, the LCDR2 of SEQ ID NO: 2295 and the LCDR3 of SEQ ID NO: 2296.

[0308] The disclosure also provides an isolated molecule, comprising: a first antigen binding domain, a second antigen binding domain and a third antigen binding domain, wherein the first antigen binding domain specifically binds CD8, the second antigen binding domain specifically binds CD3, and the third antigen binding domain specifically binds an antigen expressed by an undesired cell, wherein the isolated molecule activates or recruits CD8⁺ CTLs upon co-engagement of CD3 and CD8, wherein the first antigen binding domain that specifically binds CD8 comprises the HCDR1 of SEQ ID NO: 2307, the HCDR2 of SEQ ID NO: 2308, the HCDR3 of SEQ ID NO: 2309, the LCDR1 of SEQ ID NO: 2310, the LCDR2 of SEQ ID NO: 2311 and the LCDR3 of SEQ ID NO: 2312, and the second antigen binding domain that specifically binds CD3 comprises the HCDR1 of SEQ ID NO: 2291, the HCDR2 of SEQ ID NO: 2292, the HCDR3 of SEQ ID NO: 2293, the LCDR1 of SEQ ID NO: 2294, the LCDR2 of SEQ ID NO: 2295 and the LCDR3 of SEQ ID NO: 2296.

[0309] The disclosure also provides an isolated molecule, comprising: a first antigen binding domain, a second antigen binding domain and a third antigen binding domain, wherein the first antigen binding domain specifically binds CD8, the second antigen binding domain specifically binds CD3, and the third antigen binding domain specifically binds an antigen expressed by an undesired cell, wherein the isolated molecule activates or recruits CD8⁺ CTLs upon co-engagement of CD3 and CD8 and is unable to activate or recruit CD8⁺ CTLs in the absence of co-engagement of CD3 and CD8, wherein the first antigen binding domain that specifically binds CD8 comprises the HCDR1 of SEQ ID NO: 2307, the HCDR2 of SEQ ID NO: 2308, the HCDR3 of SEQ ID NO: 2309, the LCDR1 of SEQ ID NO: 2310, the LCDR2 of SEQ ID NO: 2311 and the LCDR3 of SEQ ID NO: 2312, and the second antigen binding domain that specifically binds CD3 comprises the HCDR1 of SEQ ID NO: 2291, the HCDR2 of SEQ ID NO: 2292, the HCDR3 of SEQ ID NO: 2293, the LCDR1 of SEQ ID NO: 2294, the LCDR2 of SEQ ID NO: 2295 and the LCDR3 of SEQ ID NO: 2296.

[0310] The disclosure also provides an isolated molecule, comprising: a first antigen binding domain, a second antigen binding domain and a third antigen binding domain, wherein the first antigen binding domain specifically binds CD8, the second antigen binding domain specifically binds CD3 and the third antigen binding domain specifically binds an antigen expressed by an undesired cell, wherein the first antigen binding domain specifically binds CD8 and the second antigen binding domain specifically binds CD3 with affinities that result in activation or recruitment of CD8⁺ CTLs only upon co-engagement of CD3 and CD8, wherein the first antigen binding domain that specifically binds CD8 comprises the HCDR1 of SEQ ID NO: 2307, the HCDR2 of SEQ ID NO: 2308, the HCDR3 of SEQ ID NO: 2309, the LCDR1 of SEQ ID NO: 2310, the LCDR2 of SEQ ID NO: 2311 and the LCDR3 of SEQ ID NO: 2312, and the second antigen binding domain that specifically binds CD3 comprises the HCDR1 of SEQ ID NO: 2291, the HCDR2 of SEQ ID NO: 2292, the HCDR3 of SEQ ID NO: 2293, the LCDR1 of SEQ ID NO: 2294, the LCDR2 of SEQ ID NO: 2295 and the LCDR3 of SEQ ID NO: 2296.

[0311] The disclosure also provides an isolated multispecific antibody, comprising: a first antigen binding domain and a second antigen binding domain, wherein the first antigen binding domain specifically binds CD8 and the second antigen binding domain specifically binds CD3, wherein the first antigen binding domain that specifically binds CD8 comprises the HCDR1 of SEQ ID NO: 2307, the HCDR2 of SEQ ID NO: 2308, the HCDR3 of SEQ ID NO: 2309, the LCDR1 of SEQ ID NO: 2310, the LCDR2 of SEQ ID NO: 2311 and the LCDR3 of SEQ ID NO: 2312, and the second antigen binding domain that specifically binds CD3 comprises the HCDR1 of SEQ ID NO: 2291, the HCDR2 of SEQ ID NO: 2292, the HCDR3 of SEQ ID NO: 2293, the LCDR1 of SEQ ID NO: 2294, the LCDR2 of SEQ ID NO: 2295 and the LCDR3 of SEQ ID NO: 2296.

[0312] The disclosure also provides an isolated multispecific antibody, comprising: a first half molecule and a second half molecule, wherein the first half molecule comprises a first antigen binding domain and a second antigen binding domain and the second half molecule comprises a third antigen binding domain, wherein the first antigen binding domain specifically binds CD8, the second antigen binding domain specifically binds CD3, and the third antigen binding domain specifically binds a third antigen, wherein the first antigen binding domain that specifically binds CD8 comprises the HCDR1 of SEQ ID NO: 2307, the HCDR2 of SEQ ID NO: 2308, the HCDR3 of SEQ ID NO: 2309, the LCDR1 of SEQ ID NO: 2310, the LCDR2 of SEQ ID NO: 2311 and the LCDR3 of SEQ ID NO: 2312, and the second antigen binding domain that specifically binds CD3 comprises the HCDR1 of SEQ ID NO: 2291, the HCDR2 of SEQ ID NO: 2292, the HCDR3 of SEQ ID NO: 2293, the LCDR1 of SEQ ID NO: 2294, the LCDR2 of SEQ ID NO: 2295 and the LCDR3 of SEQ ID NO: 2296.

[0313] The disclosure also provides an isolated multispecific antibody, comprising: a first half molecule and a second half molecule, wherein the first half molecule comprises a first antigen binding domain and a second antigen binding domain and the second half molecule comprises a third antigen binding domain, wherein the first antigen binding domain specifically binds CD8, the second antigen binding domain specifically binds CD3, and the third antigen binding domain specifically binds an antigen expressed by an undesired cell, wherein the first antigen binding domain that specifically binds CD8 comprises the HCDR1 of SEQ ID NO: 2307, the HCDR2 of SEQ ID NO: 2308, the HCDR3 of SEQ ID NO: 2309, the LCDR1 of SEQ ID NO: 2310, the LCDR2 of SEQ ID NO: 2311 and the LCDR3 of SEQ ID NO: 2312, and the second antigen binding domain that specifically binds CD3 comprises the HCDR1 of SEQ ID NO: 2291, the HCDR2 of SEQ ID NO: 2292, the HCDR3 of SEQ ID NO: 2293, the LCDR1 of SEQ ID NO: 2294, the LCDR2 of SEQ ID NO: 2295 and the LCDR3 of SEQ ID NO: 2296.

[0314] The disclosure also provides an isolated multispecific antibody, comprising: a first half molecule and a second half molecule, wherein the first half molecule comprises a first antigen binding domain and a second antigen binding domain and the second half molecule comprises a third antigen binding domain, wherein the first antigen binding domain specifically binds CD8, the second antigen binding domain specifically binds CD3, and the third antigen binding domain specifically binds an antigen expressed by an undesired cell, wherein the isolated multispecific antibody activates or recruits CD8⁺ CTLs upon co-engagement of CD3 and CD8, wherein the first antigen binding domain that specifically binds CD8 comprises the HCDR1 of SEQ ID NO: 2307, the HCDR2 of SEQ ID NO: 2308, the HCDR3 of SEQ ID NO: 2309, the LCDR1 of SEQ ID NO: 2310, the LCDR2 of SEQ ID NO: 2311 and the LCDR3 of SEQ ID NO: 2312, and the second antigen binding domain that specifically binds CD3 comprises the HCDR1 of SEQ ID NO: 2291, the HCDR2 of SEQ ID NO: 2292, the HCDR3 of SEQ ID NO: 2293, the LCDR1 of SEQ ID NO: 2294, the LCDR2 of SEQ ID NO: 2295 and the LCDR3 of SEQ ID NO: 2296.

[0315] The disclosure also provides an isolated multispecific antibody, comprising: a first half molecule and a second half molecule, wherein the first half molecule comprises a first antigen binding domain and a second antigen binding domain and the second half molecule comprises a third antigen binding domain, wherein the first antigen binding domain specifically binds CD8, the second antigen binding domain specifically binds CD3, and the third antigen binding domain specifically binds an antigen expressed by an undesired cell, wherein the isolated multispecific antibody activates or recruits CD8⁺ CTLs upon co-engagement of CD3 and CD8 and wherein the isolated multispecific antibody is unable to activate or recruit CD8⁺ CTLs in the absence of co-engagement of CD3 and CD8, wherein the first antigen binding domain that specifically binds CD8 comprises the HCDR1 of SEQ ID NO: 2307, the HCDR2 of SEQ ID NO: 2308, the HCDR3 of SEQ ID NO: 2309, the LCDR1 of SEQ ID NO: 2310, the LCDR2 of SEQ ID NO: 2311 and the LCDR3 of SEQ ID NO: 2312, and the second antigen binding domain that specifically binds CD3 comprises the HCDR1 of SEQ ID NO: 2291, the HCDR2 of SEQ ID NO: 2292, the HCDR3 of SEQ ID NO: 2293, the LCDR1 of SEQ ID NO: 2294, the LCDR2 of SEQ ID NO: 2295 and the LCDR3 of SEQ ID NO: 2296.

[0316] The disclosure also provides an isolated multispecific antibody, comprising: a first half molecule and a second half molecule, wherein the first half molecule comprises a first antigen binding domain and a second antigen binding domain and the second half molecule comprises a third antigen binding domain, wherein the first antigen binding domain specifically binds CD8, the second antigen binding domain specifically binds CD3, and the third antigen binding domain specifically binds an antigen expressed by an undesired cell, wherein the first antigen binding domain specifically binds CD8 and the second antigen binding domain specifically binds CD3 with affinities that result in activation or recruitment of CD8⁺ CTLs only upon co-engagement of CD3 and CD8, wherein the first antigen binding domain that specifically binds CD8 comprises the HCDR1 of SEQ ID NO: 2307, the HCDR2 of SEQ ID NO: 2308, the HCDR3 of SEQ ID NO: 2309, the LCDR1 of SEQ ID NO: 2310, the LCDR2 of SEQ ID NO: 2311 and the LCDR3 of SEQ ID NO: 2312, and the second antigen binding domain that specifically binds CD3 comprises the HCDR1 of SEQ ID NO: 2291, the HCDR2 of SEQ ID NO: 2292, the HCDR3 of SEQ ID NO: 2293, the LCDR1 of SEQ ID NO: 2294, the LCDR2 of SEQ ID NO: 2295 and the LCDR3 of SEQ ID NO: 2296.

[0317] The disclosure also provides an isolated molecule, comprising: a first antigen binding domain, a second antigen binding domain and a third antigen binding domain, wherein the first antigen binding domain specifically binds CD8, the second antigen binding domain specifically binds a TCR complex, and the third antigen binding domain specifically binds an antigen expressed by an undesired cell, and wherein the antigen expressed by the undesired cell is BCMA. Exemplary first antigen binding domains and second antigen binding domains are provided herein. It is contemplated that an isolated molecule provided herein can comprise any first antigen binding domain specifically binds CD8 provided herein, and any second antigen binding domain specifically binds a TCR complex provided herein. In certain embodiments, the isolated molecule comprises a first antigen binding domain that specifically binds CD8 provided herein.

[0318] The disclosure also provides an isolated molecule, comprising: a first antigen binding domain, a second antigen binding domain and a third antigen binding domain, wherein the first antigen binding domain specifically binds CD8, the second antigen binding domain specifically binds a TCR complex, and the third antigen binding domain specifically binds an antigen expressed by an undesired cell, wherein the isolated molecule activates or recruits CD8⁺ CTLs upon co-engagement of the TCR complex and CD8, and wherein the antigen expressed by the undesired cell is BCMA. Exemplary first antigen binding domains and second antigen binding domains are provided herein. It is contemplated that an isolated molecule provided herein can comprise any first antigen binding domain specifically binds CD8 provided herein, and any second antigen binding domain specifically binds a TCR complex provided herein. In certain embodiments, the isolated molecule comprises a first antigen binding domain that specifically binds CD8 provided herein.

[0319] The disclosure also provides an isolated molecule, comprising: a first antigen binding domain, a second antigen binding domain and a third antigen binding domain, wherein the first antigen binding domain specifically binds CD8, the second antigen binding domain specifically binds a TCR complex, and the third antigen binding domain specifically binds an antigen expressed by an undesired cell, wherein the isolated molecule activates or recruits CD8⁺ CTLs upon co-engagement of the TCR complex and CD8 and is unable to activate or recruit CD8⁺ CTLs in the absence of co-engagement of the TCR complex and CD8, and wherein the antigen expressed by the undesired cell is BCMA. Exemplary first antigen binding domains and second antigen binding domains are provided herein. It is contemplated that an isolated molecule provided herein can comprise any first antigen binding domain specifically binds CD8 provided herein, and any second antigen binding domain specifically binds a TCR complex provided herein. In certain embodiments, the isolated molecule comprises a first antigen binding domain that specifically binds CD8 provided herein.

[0320] The disclosure also provides an isolated molecule, comprising: a first antigen binding domain, a second antigen binding domain and a third antigen binding domain, wherein the first antigen binding domain specifically binds CD8, the second antigen binding domain specifically binds a TCR complex, and the third antigen binding domain specifically binds an antigen expressed by an undesired cell, wherein the first antigen binding domain specifically binds CD8 and the second antigen binding domain specifically binds the TCR with affinities that result in activation or recruitment of CD8⁺ CTLs only upon co-engagement of the TCR complex and CD8, and wherein the antigen expressed by the undesired cell is BCMA. Exemplary first antigen binding domains and second antigen binding domains are provided herein. It is contemplated that an isolated molecule provided herein can comprise any first antigen binding domain specifically binds CD8 provided herein, and any second antigen binding domain specifically binds a TCR complex provided herein. In certain embodiments, the isolated molecule comprises a first antigen binding domain that specifically binds CD8 provided herein.

[0321] The disclosure also provides an isolated multispecific antibody, comprising: a first half molecule and a second half molecule, wherein the first half molecule comprises a first antigen binding domain and a second antigen binding domain and the second half molecule comprises a third antigen binding domain, wherein the first antigen binding domain specifically binds CD8, the second antigen binding domain specifically binds a TCR complex, and the third antigen binding domain specifically binds an antigen expressed by an undesired cell, and wherein the antigen expressed by the undesired cell is BCMA. Exemplary first antigen binding domains and second antigen binding domains are provided herein. It is contemplated that an isolated molecule provided herein can comprise any first antigen binding domain specifically binds CD8 provided herein, and any second antigen binding domain specifically binds a TCR complex provided herein. In certain embodiments, the isolated multispecific antibody comprises a first antigen binding domain that specifically binds CD8 provided herein.

[0322] The disclosure also provides an isolated multispecific antibody, comprising: a first half molecule and a second half molecule, wherein the first half molecule comprises a first antigen binding domain and a second antigen binding domain and the second half molecule comprises a third antigen binding domain, wherein the first antigen binding domain specifically binds CD8, the second antigen binding domain specifically binds a TCR complex, and the third antigen binding domain specifically binds an antigen expressed by an undesired cell, wherein the isolated multispecific antibody activates or recruits CD8⁺ CTLs upon co-engagement of the TCR complex and CD8, and wherein the antigen expressed by the undesired cell is BCMA. Exemplary first antigen binding domains and second antigen binding domains are provided herein. It is contemplated that an isolated molecule provided herein can comprise any first antigen binding domain specifically binds CD8 provided herein, and any second antigen binding domain specifically binds a TCR complex provided herein. In certain embodiments, the isolated multispecific antibody comprises a first antigen binding domain that specifically binds CD8 provided herein.

[0323] The disclosure also provides an isolated multispecific antibody, comprising: a first half molecule and a second half molecule, wherein the first half molecule comprises a first antigen binding domain and a second antigen binding domain and the second half molecule comprises a third antigen binding domain, wherein the first antigen binding domain specifically binds CD8, the second antigen binding domain specifically binds a TCR complex, and the third antigen binding domain specifically binds an antigen expressed by an undesired cell, wherein the isolated multispecific antibody activates or recruits CD8⁺ CTLs upon co-engagement of the TCR complex and CD8 and wherein the isolated multispecific antibody is unable to activate or recruit CD8⁺ CTLs in the absence of co-engagement of the TCR complex and CD8, and wherein the antigen expressed by the undesired cell is BCMA. Exemplary first antigen binding domains and second antigen binding domains are provided herein. It is contemplated that an isolated molecule provided herein can comprise any first antigen binding domain specifically binds CD8 provided herein, and any second antigen binding domain specifically binds a TCR complex provided herein. In certain embodiments, the isolated multispecific antibody comprises a first antigen binding domain that specifically binds CD8 provided herein.

[0324] The disclosure also provides an isolated multispecific antibody, comprising: a first half molecule and a second half molecule, wherein the first half molecule comprises a first antigen binding domain and a second antigen binding domain and the second half molecule comprises a third antigen binding domain, wherein the first antigen binding domain specifically binds CD8, the second antigen binding domain specifically binds a TCR complex, and the third antigen binding domain specifically binds an antigen expressed by an undesired cell, wherein the first antigen binding domain specifically binds CD8 and the second antigen binding domain specifically binds the TCR complex with affinities that result in activation or recruitment of CD8⁺ CTLs only upon co-engagement of the TCR complex and CD8, and wherein the antigen expressed by the undesired cell is BCMA. Exemplary first antigen binding domains and second antigen binding domains are provided herein. It is contemplated that an isolated molecule provided herein can comprise any first antigen binding domain specifically binds CD8 provided herein, and any second antigen binding domain specifically binds a TCR complex provided herein. In certain embodiments, the isolated multispecific antibody comprises a first antigen binding domain that specifically binds CD8 provided herein.

[0325] The disclosure also provides an isolated molecule, comprising: a first antigen binding domain, a second antigen binding domain and a third antigen binding domain, wherein the first antigen binding domain specifically binds CD8, the second antigen binding domain specifically binds CD3, and the third antigen binding domain specifically binds an antigen expressed by an undesired cell, and wherein the antigen expressed by the undesired cell is BCMA. Exemplary first antigen binding domains and second antigen binding domains are provided herein. It is contemplated that an isolated molecule provided herein can comprise any first antigen binding domain specifically binds CD8 provided herein, and any second antigen binding domain specifically binds CD3 provided herein. In certain embodiments, the isolated molecule comprises a first antigen binding domain that specifically binds CD8 provided herein.

[0326] The disclosure also provides an isolated molecule, comprising: a first antigen binding domain, a second antigen binding domain and a third antigen binding domain, wherein the first antigen binding domain specifically binds CD8, the second antigen binding domain specifically binds CD3, and the third antigen binding domain specifically binds an antigen expressed by an undesired cell, wherein the isolated molecule activates or recruits CD8⁺ CTLs upon co-engagement of CD3 and CD8, and wherein the antigen expressed by the undesired cell is BCMA. Exemplary first antigen binding domains and second antigen binding domains are provided herein. It is contemplated that an isolated molecule provided herein can comprise any first antigen binding domain specifically binds CD8 provided herein, and any second antigen binding domain specifically binds CD3 provided herein. In certain embodiments, the isolated molecule comprises a first antigen binding domain that specifically binds CD8 provided herein.

[0327] The disclosure also provides an isolated molecule, comprising: a first antigen binding domain, a second antigen binding domain and a third antigen binding domain, wherein the first antigen binding domain specifically binds CD8, the second antigen binding domain specifically binds CD3, and the third antigen binding domain specifically binds an antigen expressed by an undesired cell, wherein the isolated molecule activates or recruits CD8⁺ CTLs upon co-engagement of CD3 and CD8 and is unable to activate or recruit CD8⁺ CTLs in the absence of co-engagement of CD3 and CD8, and wherein the antigen expressed by the undesired cell is BCMA. Exemplary first antigen binding domains and second antigen binding domains are provided herein. It is contemplated that an isolated molecule provided herein can comprise any first antigen binding domain specifically binds CD8 provided herein, and any second antigen binding domain specifically binds CD3 provided herein. In certain embodiments, the isolated molecule comprises a first antigen binding domain that specifically binds CD8 provided herein.

[0328] The disclosure also provides an isolated molecule, comprising: a first antigen binding domain, a second antigen binding domain and a third antigen binding domain, wherein the first antigen binding domain specifically binds CD8, the second antigen binding domain specifically binds CD3 and the third antigen binding domain specifically binds an antigen expressed by an undesired cell, wherein the first antigen binding domain specifically binds CD8 and the second antigen binding domain specifically binds CD3 with affinities that result in activation or recruitment of CD8⁺ CTLs only upon co-engagement of CD3 and CD8, and wherein the antigen expressed by the undesired cell is BCMA. Exemplary first antigen binding domains and second antigen binding domains are provided herein. It is contemplated that an isolated molecule provided herein can comprise any first antigen binding domain specifically binds CD8 provided herein, and any second antigen binding domain specifically binds CD3 provided herein. In certain embodiments, the isolated molecule comprises a first antigen binding domain that specifically binds CD8 provided herein.

[0329] The disclosure also provides an isolated multispecific antibody, comprising: a first half molecule and a second half molecule, wherein the first half molecule comprises a first antigen binding domain and a second antigen binding domain and the second half molecule comprises a third antigen binding domain, wherein the first antigen binding domain specifically binds CD8, the second antigen binding domain specifically binds CD3, and the third antigen binding domain specifically binds an antigen expressed by an undesired cell, and wherein the antigen expressed by the undesired cell is BCMA. Exemplary first antigen binding domains and second antigen binding domains are provided herein. It is contemplated that an isolated molecule provided herein can comprise any first antigen binding domain specifically binds CD8 provided herein, and any second antigen binding domain specifically binds CD3 provided herein. In certain embodiments, the isolated multispecific antibody comprises a first antigen binding domain that specifically binds CD8 provided herein.

[0330] The disclosure also provides an isolated multispecific antibody, comprising: a first half molecule and a second half molecule, wherein the first half molecule comprises a first antigen binding domain and a second antigen binding domain and the second half molecule comprises a third antigen binding domain, wherein the first antigen binding domain specifically binds CD8, the second antigen binding domain specifically binds CD3, and the third antigen binding domain specifically binds an antigen expressed by an undesired cell, wherein the isolated multispecific antibody activates or recruits CD8⁺ CTLs upon co-engagement of CD3 and CD8, and wherein the antigen expressed by the undesired cell is BCMA. Exemplary first antigen binding domains and second antigen binding domains are provided herein. It is contemplated that an isolated molecule provided herein can comprise any first antigen binding domain specifically binds CD8 provided herein, and any second antigen binding domain specifically binds CD3 provided herein. In certain embodiments, the isolated multispecific antibody comprises a first antigen binding domain that specifically binds CD8 provided herein.

[0331] The disclosure also provides an isolated multispecific antibody, comprising: a first half molecule and a second half molecule, wherein the first half molecule comprises a first antigen binding domain and a second antigen binding domain and the second half molecule comprises a third antigen binding domain, wherein the first antigen binding domain specifically binds CD8, the second antigen binding domain specifically binds CD3, and the third antigen binding domain specifically binds an antigen expressed by an undesired cell, wherein the isolated multispecific antibody activates or recruits CD8⁺ CTLs upon co-engagement of CD3 and CD8 and wherein the isolated multispecific antibody is unable to activate or recruit CD8⁺ CTLs in the absence of co-engagement of CD3 and CD8, and wherein the antigen expressed by the undesired cell is BCMA. Exemplary first antigen binding domains and second antigen binding domains are provided herein. It is contemplated that an isolated molecule provided herein can comprise any first antigen binding domain specifically binds CD8 provided herein, and any second antigen binding domain specifically binds CD3 provided herein. In certain embodiments, the isolated multispecific antibody comprises a first antigen binding domain that specifically binds CD8 provided herein.

[0332] The disclosure also provides an isolated multispecific antibody, comprising: a first half molecule and a second half molecule, wherein the first half molecule comprises a first antigen binding domain and a second antigen binding domain and the second half molecule comprises a third antigen binding domain, wherein the first antigen binding domain specifically binds CD8, the second antigen binding domain specifically binds CD3, and the third antigen binding domain specifically binds an antigen expressed by an undesired cell, wherein the first antigen binding domain specifically binds CD8 and the second antigen binding domain specifically binds CD3 with affinities that result in activation or recruitment of CD8⁺ CTLs only upon co-engagement of CD3 and CD8, and wherein the antigen expressed by the undesired cell is BCMA. Exemplary first antigen binding domains and second antigen binding domains are provided herein. It is contemplated that an isolated molecule provided herein can comprise any first antigen binding domain specifically binds CD8 provided herein, and any second antigen binding domain specifically binds CD3 provided herein. In certain embodiments, the isolated multispecific antibody comprises a first antigen binding domain that specifically binds CD8 provided herein.

[0333] The disclosure also provides an isolated molecule, comprising: a first antigen binding domain, a second antigen binding domain and a third antigen binding domain, wherein the first antigen binding domain specifically binds CD8, the second antigen binding domain specifically binds CD3, and the third antigen binding domain specifically binds an antigen expressed by an undesired cell, wherein the second antigen binding domain that specifically binds CD3 comprises the HCDR1 of SEQ ID NO: 2291, the HCDR2 of SEQ ID NO: 2292, the HCDR3 of SEQ ID NO: 2293, the LCDR1 of SEQ ID NO: 2294, the LCDR2 of SEQ ID NO: 2295 and the LCDR3 of SEQ ID NO: 2296, and wherein the antigen expressed by the undesired cell is BCMA. In certain embodiments, the isolated molecule comprises a first antigen binding domain that specifically binds CD8 provided herein.

[0334] The disclosure also provides an isolated molecule, comprising: a first antigen binding domain, a second antigen binding domain and a third antigen binding domain, wherein the first antigen binding domain specifically binds CD8, the second antigen binding domain specifically binds CD3, and the third antigen binding domain specifically binds an antigen expressed by an undesired cell, wherein the isolated molecule activates or recruits CD8⁺ CTLs upon co-engagement of CD3 and CD8, wherein the second antigen binding domain that specifically binds CD3 comprises the HCDR1 of SEQ ID NO: 2291, the HCDR2 of SEQ ID NO: 2292, the HCDR3 of SEQ ID NO: 2293, the LCDR1 of SEQ ID NO: 2294, the LCDR2 of SEQ ID NO: 2295 and the LCDR3 of SEQ ID NO: 2296, and wherein the antigen expressed by the undesired cell is BCMA. In certain embodiments, the isolated molecule comprises a first antigen binding domain that specifically binds CD8 provided herein.

[0335] The disclosure also provides an isolated molecule, comprising: a first antigen binding domain, a second antigen binding domain and a third antigen binding domain, wherein the first antigen binding domain specifically binds CD8, the second antigen binding domain specifically binds CD3, and the third antigen binding domain specifically binds an antigen expressed by an undesired cell, wherein the isolated molecule activates or recruits CD8⁺ CTLs upon co-engagement of CD3 and CD8 and is unable to activate or recruit CD8⁺ CTLs in the absence of co-engagement of CD3 and CD8, wherein the second antigen binding domain that specifically binds CD3 comprises the HCDR1 of SEQ ID NO: 2291, the HCDR2 of SEQ ID NO: 2292, the HCDR3 of SEQ ID NO: 2293, the LCDR1 of SEQ ID NO: 2294, the LCDR2 of SEQ ID NO: 2295 and the LCDR3 of SEQ ID NO: 2296, and wherein the antigen expressed by the undesired cell is BCMA. In certain embodiments, the isolated molecule comprises a first antigen binding domain that specifically binds CD8 provided herein.

[0336] The disclosure also provides an isolated molecule, comprising: a first antigen binding domain, a second antigen binding domain and a third antigen binding domain, wherein the first antigen binding domain specifically binds CD8, the second antigen binding domain specifically binds CD3 and the third antigen binding domain specifically binds an antigen expressed by an undesired cell, wherein the first antigen binding domain specifically binds CD8 and the second antigen binding domain specifically binds CD3 with affinities that result in activation or recruitment of CD8⁺ CTLs only upon co-engagement of CD3 and CD8, wherein the second antigen binding domain that specifically binds CD3 comprises the HCDR1 of SEQ ID NO: 2291, the HCDR2 of SEQ ID NO: 2292, the HCDR3 of SEQ ID NO: 2293, the LCDR1 of SEQ ID NO: 2294, the LCDR2 of SEQ ID NO: 2295 and the LCDR3 of SEQ ID NO: 2296, and wherein the antigen expressed by the undesired cell is BCMA. In certain embodiments, the isolated molecule comprises a first antigen binding domain that specifically binds CD8 provided herein.

[0337] The disclosure also provides an isolated multispecific antibody, comprising: a first half molecule and a second half molecule, wherein the first half molecule comprises a first antigen binding domain and a second antigen binding domain and the second half molecule comprises a third antigen binding domain, wherein the first antigen binding domain specifically binds CD8, the second antigen binding domain specifically binds CD3, and the third antigen binding domain specifically binds an antigen expressed by an undesired cell, wherein the second antigen binding domain that specifically binds CD3 comprises the HCDR1 of SEQ ID NO: 2291, the HCDR2 of SEQ ID NO: 2292, the HCDR3 of SEQ ID NO: 2293, the LCDR1 of SEQ ID NO: 2294, the LCDR2 of SEQ ID NO: 2295 and the LCDR3 of SEQ ID NO: 2296, and wherein the antigen expressed by the undesired cell is BCMA. In certain embodiments, the isolated multispecific antibody comprises a first antigen binding domain that specifically binds CD8 provided herein.

[0338] The disclosure also provides an isolated multispecific antibody, comprising: a first half molecule and a second half molecule, wherein the first half molecule comprises a first antigen binding domain and a second antigen binding domain and the second half molecule comprises a third antigen binding domain, wherein the first antigen binding domain specifically binds CD8, the second antigen binding domain specifically binds CD3, and the third antigen binding domain specifically binds an antigen expressed by an undesired cell, wherein the isolated multispecific antibody activates or recruits CD8⁺ CTLs upon co-engagement of CD3 and CD8, wherein the second antigen binding domain that specifically binds CD3 comprises the HCDR1 of SEQ ID NO: 2291, the HCDR2 of SEQ ID NO: 2292, the HCDR3 of SEQ ID NO: 2293, the LCDR1 of SEQ ID NO: 2294, the LCDR2 of SEQ ID NO: 2295 and the LCDR3 of SEQ ID NO: 2296, and wherein the antigen expressed by the undesired cell is BCMA. In certain embodiments, the isolated multispecific antibody comprises a first antigen binding domain that specifically binds CD8 provided herein.

[0339] The disclosure also provides an isolated multispecific antibody, comprising: a first half molecule and a second half molecule, wherein the first half molecule comprises a first antigen binding domain and a second antigen binding domain and the second half molecule comprises a third antigen binding domain, wherein the first antigen binding domain specifically binds CD8, the second antigen binding domain specifically binds CD3, and the third antigen binding domain specifically binds an antigen expressed by an undesired cell, wherein the isolated multispecific antibody activates or recruits CD8⁺ CTLs upon co-engagement of CD3 and CD8 and wherein the isolated multispecific antibody is unable to activate or recruit CD8⁺ CTLs in the absence of co-engagement of CD3 and CD8, wherein the second antigen binding domain that specifically binds CD3 comprises the HCDR1 of SEQ ID NO: 2291, the HCDR2 of SEQ ID NO: 2292, the HCDR3 of SEQ ID NO: 2293, the LCDR1 of SEQ ID NO: 2294, the LCDR2 of SEQ ID NO: 2295 and the LCDR3 of SEQ ID NO: 2296, and wherein the antigen expressed by the undesired cell is BCMA. In certain embodiments, the isolated multispecific antibody comprises a first antigen binding domain that specifically binds CD8 provided herein.

[0340] The disclosure also provides an isolated multispecific antibody, comprising: a first half molecule and a second half molecule, wherein the first half molecule comprises a first antigen binding domain and a second antigen binding domain and the second half molecule comprises a third antigen binding domain, wherein the first antigen binding domain specifically binds CD8, the second antigen binding domain specifically binds CD3, and the third antigen binding domain specifically binds an antigen expressed by an undesired cell, wherein the first antigen binding domain specifically binds CD8 and the second antigen binding domain specifically binds CD3 with affinities that result in activation or recruitment of CD8⁺ CTLs only upon co-engagement of CD3 and CD8, wherein the second antigen binding domain that specifically binds CD3 comprises the HCDR1 of SEQ ID NO: 2291, the HCDR2 of SEQ ID NO: 2292, the HCDR3 of SEQ ID NO: 2293, the LCDR1 of SEQ ID NO: 2294, the LCDR2 of SEQ ID NO: 2295 and the LCDR3 of SEQ ID NO: 2296, and wherein the antigen expressed by the undesired cell is BCMA. In certain embodiments, the isolated multispecific antibody comprises a first antigen binding domain that specifically binds CD8 provided herein.

[0341] The disclosure also provides an isolated molecule, comprising: a first antigen binding domain, a second antigen binding domain and a third antigen binding domain, wherein the first antigen binding domain specifically binds CD8, the second antigen binding domain specifically binds CD3, and the third antigen binding domain specifically binds an antigen expressed by an undesired cell, wherein the second antigen binding domain that specifically binds CD3 comprises the VH of SEQ ID NO: 2297 and the VL of SEQ ID NO: 2298, and wherein the antigen expressed by the undesired cell is BCMA. In certain embodiments, the isolated molecule comprises a first antigen binding domain that specifically binds CD8 provided herein.

[0342] The disclosure also provides an isolated molecule, comprising: a first antigen binding domain, a second antigen binding domain and a third antigen binding domain, wherein the first antigen binding domain specifically binds CD8, the second antigen binding domain specifically binds CD3, and the third antigen binding domain specifically binds an antigen expressed by an undesired cell, wherein the isolated molecule activates or recruits CD8⁺ CTLs upon co-engagement of CD3 and CD8, wherein the second antigen binding domain that specifically binds CD3 comprises the VH of SEQ ID NO: 2297 and the VL of SEQ ID NO: 2298, and wherein the antigen expressed by the undesired cell is BCMA. In certain embodiments, the isolated molecule comprises a first antigen binding domain that specifically binds CD8 provided herein.

[0343] The disclosure also provides an isolated molecule, comprising: a first antigen binding domain, a second antigen binding domain and a third antigen binding domain, wherein the first antigen binding domain specifically binds CD8, the second antigen binding domain specifically binds CD3, and the third antigen binding domain specifically binds an antigen expressed by an undesired cell, wherein the isolated molecule activates or recruits CD8⁺ CTLs upon co-engagement of CD3 and CD8 and is unable to activate or recruit CD8⁺ CTLs in the absence of co-engagement of CD3 and CD8, wherein the second antigen binding domain that specifically binds CD3 comprises the VH of SEQ ID NO: 2297 and the VL of SEQ ID NO: 2298, and wherein the antigen expressed by the undesired cell is BCMA. In certain embodiments, the isolated molecule comprises a first antigen binding domain that specifically binds CD8 provided herein.

[0344] The disclosure also provides an isolated molecule, comprising: a first antigen binding domain, a second antigen binding domain and a third antigen binding domain, wherein the first antigen binding domain specifically binds CD8, the second antigen binding domain specifically binds CD3 and the third antigen binding domain specifically binds an antigen expressed by an undesired cell, wherein the first antigen binding domain specifically binds CD8 and the second antigen binding domain specifically binds CD3 with affinities that result in activation or recruitment of CD8⁺ CTLs only upon co-engagement of CD3 and CD8, wherein the second antigen binding domain that specifically binds CD3 comprises the VH of SEQ ID NO: 2297 and the VL of SEQ ID NO: 2298, and wherein the antigen expressed by the undesired cell is BCMA. In certain embodiments, the isolated molecule comprises a first antigen binding domain that specifically binds CD8 provided herein.

[0345] The disclosure also provides an isolated multispecific antibody, comprising: a first half molecule and a second half molecule, wherein the first half molecule comprises a first antigen binding domain and a second antigen binding domain and the second half molecule comprises a third antigen binding domain, wherein the first antigen binding domain specifically binds CD8, the second antigen binding domain specifically binds CD3, and the third antigen binding domain specifically binds an antigen expressed by an undesired cell, wherein the second antigen binding domain that specifically binds CD3 comprises the VH of SEQ ID NO: 2297 and the VL of SEQ ID NO: 2298, and wherein the antigen expressed by the undesired cell is BCMA. In certain embodiments, the isolated multispecific antibody comprises a first antigen binding domain that specifically binds CD8 provided herein.

[0346] The disclosure also provides an isolated multispecific antibody, comprising: a first half molecule and a second half molecule, wherein the first half molecule comprises a first antigen binding domain and a second antigen binding domain and the second half molecule comprises a third antigen binding domain, wherein the first antigen binding domain specifically binds CD8, the second antigen binding domain specifically binds CD3, and the third antigen binding domain specifically binds an antigen expressed by an undesired cell, wherein the isolated multispecific antibody activates or recruits CD8⁺ CTLs upon co-engagement of CD3 and CD8, wherein the second antigen binding domain that specifically binds CD3 comprises the VH of SEQ ID NO: 2297 and the VL of SEQ ID NO: 2298, and wherein the antigen expressed by the undesired cell is BCMA. In certain embodiments, the isolated multispecific antibody comprises a first antigen binding domain that specifically binds CD8 provided herein.

[0347] The disclosure also provides an isolated multispecific antibody, comprising: a first half molecule and a second half molecule, wherein the first half molecule comprises a first antigen binding domain and a second antigen binding domain and the second half molecule comprises a third antigen binding domain, wherein the first antigen binding domain specifically binds CD8, the second antigen binding domain specifically binds CD3, and the third antigen binding domain specifically binds an antigen expressed by an undesired cell, wherein the isolated multispecific antibody activates or recruits CD8⁺ CTLs upon co-engagement of CD3 and CD8 and wherein the isolated multispecific antibody is unable to activate or recruit CD8⁺ CTLs in the absence of co-engagement of CD3 and CD8, wherein the second antigen binding domain that specifically binds CD3 comprises the VH of SEQ ID NO: 2297 and the VL of SEQ ID NO: 2298, and wherein the antigen expressed by the undesired cell is BCMA. In certain embodiments, the isolated multispecific antibody comprises a first antigen binding domain that specifically binds CD8 provided herein.

[0348] The disclosure also provides an isolated multispecific antibody, comprising: a first half molecule and a second half molecule, wherein the first half molecule comprises a first antigen binding domain and a second antigen binding domain and the second half molecule comprises a third antigen binding domain, wherein the first antigen binding domain specifically binds CD8, the second antigen binding domain specifically binds CD3, and the third antigen binding domain specifically binds an antigen expressed by an undesired cell, wherein the first antigen binding domain specifically binds CD8 and the second antigen binding domain specifically binds CD3 with affinities that result in activation or recruitment of CD8⁺ CTLs only upon co-engagement of CD3 and CD8, wherein the second antigen binding domain that specifically binds CD3 comprises the VH of SEQ ID NO: 2297 and the VL of SEQ ID NO: 2298, and wherein the antigen expressed by the undesired cell is BCMA. In certain embodiments, the isolated multispecific antibody comprises a first antigen binding domain that specifically binds CD8 provided herein.

[0349] The disclosure also provides an isolated molecule, comprising: a first antigen binding domain, a second antigen binding domain and a third antigen binding domain, wherein the first antigen binding domain specifically binds CD8, the second antigen binding domain specifically binds CD3, and the third antigen binding domain specifically binds an antigen expressed by an undesired cell, wherein the first antigen binding domain that specifically binds CD8 comprises the HCDR1 of SEQ ID NO: 2307, the HCDR2 of SEQ ID NO: 2308, the HCDR3 of SEQ ID NO: 2309, the LCDR1 of SEQ ID NO: 2310, the LCDR2 of SEQ ID NO: 2311 and the LCDR3 of SEQ ID NO: 2312, and wherein the antigen expressed by the undesired cell is BCMA.

[0350] The disclosure also provides an isolated molecule, comprising: a first antigen binding domain, a second antigen binding domain and a third antigen binding domain, wherein the first antigen binding domain specifically binds CD8, the second antigen binding domain specifically binds CD3, and the third antigen binding domain specifically binds an antigen expressed by an undesired cell, wherein the isolated molecule activates or recruits CD8⁺ CTLs upon co-engagement of CD3 and CD8, wherein the first antigen binding domain that specifically binds CD8 comprises the HCDR1 of SEQ ID NO: 2307, the HCDR2 of SEQ ID NO: 2308, the HCDR3 of SEQ ID NO: 2309, the LCDR1 of SEQ ID NO: 2310, the LCDR2 of SEQ ID NO: 2311 and the LCDR3 of SEQ ID NO: 2312, and wherein the antigen expressed by the undesired cell is BCMA.

[0351] The disclosure also provides an isolated molecule, comprising: a first antigen binding domain, a second antigen binding domain and a third antigen binding domain, wherein the first antigen binding domain specifically binds CD8, the second antigen binding domain specifically binds CD3, and the third antigen binding domain specifically binds an antigen expressed by an undesired cell, wherein the isolated molecule activates or recruits CD8⁺ CTLs upon co-engagement of CD3 and CD8 and is unable to activate or recruit CD8⁺ CTLs in the absence of co-engagement of CD3 and CD8, wherein the first antigen binding domain that specifically binds CD8 comprises the HCDR1 of SEQ ID NO: 2307, the HCDR2 of SEQ ID NO: 2308, the HCDR3 of SEQ ID NO: 2309, the LCDR1 of SEQ ID NO: 2310, the LCDR2 of SEQ ID NO: 2311 and the LCDR3 of SEQ ID NO: 2312, and wherein the antigen expressed by the undesired cell is BCMA.

[0352] The disclosure also provides an isolated molecule, comprising: a first antigen binding domain, a second antigen binding domain and a third antigen binding domain, wherein the first antigen binding domain specifically binds CD8, the second antigen binding domain specifically binds CD3 and the third antigen binding domain specifically binds an antigen expressed by an undesired cell, wherein the first antigen binding domain specifically binds CD8 and the second antigen binding domain specifically binds CD3 with affinities that result in activation or recruitment of CD8⁺ CTLs only upon co-engagement of CD3 and CD8, wherein the first antigen binding domain that specifically binds CD8 comprises the HCDR1 of SEQ ID NO: 2307, the HCDR2 of SEQ ID NO: 2308, the HCDR3 of SEQ ID NO: 2309, the LCDR1 of SEQ ID NO: 2310, the LCDR2 of SEQ ID NO: 2311 and the LCDR3 of SEQ ID NO: 2312, and wherein the antigen expressed by the undesired cell is BCMA.

[0353] The disclosure also provides an isolated multispecific antibody, comprising: a first half molecule and a second half molecule, wherein the first half molecule comprises a first antigen binding domain and a second antigen binding domain and the second half molecule comprises a third antigen binding domain, wherein the first antigen binding domain specifically binds CD8, the second antigen binding domain specifically binds CD3, and the third antigen binding domain specifically binds an antigen expressed by an undesired cell, wherein the first antigen binding domain that specifically binds CD8 comprises the HCDR1 of SEQ ID NO: 2307, the HCDR2 of SEQ ID NO: 2308, the HCDR3 of SEQ ID NO: 2309, the LCDR1 of SEQ ID NO: 2310, the LCDR2 of SEQ ID NO: 2311 and the LCDR3 of SEQ ID NO: 2312, and wherein the antigen expressed by the undesired cell is BCMA.

[0354] The disclosure also provides an isolated multispecific antibody, comprising: a first half molecule and a second half molecule, wherein the first half molecule comprises a first antigen binding domain and a second antigen binding domain and the second half molecule comprises a third antigen binding domain, wherein the first antigen binding domain specifically binds CD8, the second antigen binding domain specifically binds CD3, and the third antigen binding domain specifically binds an antigen expressed by an undesired cell, wherein the isolated multispecific antibody activates or recruits CD8⁺ CTLs upon co-engagement of CD3 and CD8, wherein the first antigen binding domain that specifically binds CD8 comprises the HCDR1 of SEQ ID NO: 2307, the HCDR2 of SEQ ID NO: 2308, the HCDR3 of SEQ ID NO: 2309, the LCDR1 of SEQ ID NO: 2310, the LCDR2 of SEQ ID NO: 2311 and the LCDR3 of SEQ ID NO: 2312, and wherein the antigen expressed by the undesired cell is BCMA.

[0355] The disclosure also provides an isolated multispecific antibody, comprising: a first half molecule and a second half molecule, wherein the first half molecule comprises a first antigen binding domain and a second antigen binding domain and the second half molecule comprises a third antigen binding domain, wherein the first antigen binding domain specifically binds CD8, the second antigen binding domain specifically binds CD3, and the third antigen binding domain specifically binds an antigen expressed by an undesired cell, wherein the isolated multispecific antibody activates or recruits CD8⁺ CTLs upon co-engagement of CD3 and CD8 and wherein the isolated multispecific antibody is unable to activate or recruit CD8⁺ CTLs in the absence of co-engagement of CD3 and CD8, wherein the first antigen binding domain that specifically binds CD8 comprises the HCDR1 of SEQ ID NO: 2307, the HCDR2 of SEQ ID NO: 2308, the HCDR3 of SEQ ID NO: 2309, the LCDR1 of SEQ ID NO: 2310, the LCDR2 of SEQ ID NO: 2311 and the LCDR3 of SEQ ID NO: 2312, and wherein the antigen expressed by the undesired cell is BCMA.

[0356] The disclosure also provides an isolated multispecific antibody, comprising: a first half molecule and a second half molecule, wherein the first half molecule comprises a first antigen binding domain and a second antigen binding domain and the second half molecule comprises a third antigen binding domain, wherein the first antigen binding domain specifically binds CD8, the second antigen binding domain specifically binds CD3, and the third antigen binding domain specifically binds an antigen expressed by an undesired cell, wherein the first antigen binding domain specifically binds CD8 and the second antigen binding domain specifically binds CD3 with affinities that result in activation or recruitment of CD8⁺ CTLs only upon co-engagement of CD3 and CD8, wherein the first antigen binding domain that specifically binds CD8 comprises the HCDR1 of SEQ ID NO: 2307, the HCDR2 of SEQ ID NO: 2308, the HCDR3 of SEQ ID NO: 2309, the LCDR1 of SEQ ID NO: 2310, the LCDR2 of SEQ ID NO: 2311 and the LCDR3 of SEQ ID NO: 2312, and wherein the antigen expressed by the undesired cell is BCMA.

[0357] The disclosure also provides an isolated molecule, comprising: a first antigen binding domain, a second antigen binding domain and a third antigen binding domain, wherein the first antigen binding domain specifically binds CD8, the second antigen binding domain specifically binds CD3, and the third antigen binding domain specifically binds an antigen expressed by an undesired cell, wherein the first antigen binding domain that specifically binds CD8 comprises the HCDR1 of SEQ ID NO: 2307, the HCDR2 of SEQ ID NO: 2308, the HCDR3 of SEQ ID NO: 2309, the LCDR1 of SEQ ID NO: 2310, the LCDR2 of SEQ ID NO: 2311 and the LCDR3 of SEQ ID NO: 2312, and the second antigen binding domain that specifically binds CD3 comprises the HCDR1 of SEQ ID NO: 2291, the HCDR2 of SEQ ID NO: 2292, the HCDR3 of SEQ ID NO: 2293, the LCDR1 of SEQ ID NO: 2294, the LCDR2 of SEQ ID NO: 2295 and the LCDR3 of SEQ ID NO: 2296, and wherein the antigen expressed by the undesired cell is BCMA.

[0358] The disclosure also provides an isolated molecule, comprising: a first antigen binding domain, a second antigen binding domain and a third antigen binding domain, wherein the first antigen binding domain specifically binds CD8, the second antigen binding domain specifically binds CD3, and the third antigen binding domain specifically binds an antigen expressed by an undesired cell, wherein the isolated molecule activates or recruits CD8⁺ CTLs upon co-engagement of CD3 and CD8, wherein the first antigen binding domain that specifically binds CD8 comprises the HCDR1 of SEQ ID NO: 2307, the HCDR2 of SEQ ID NO: 2308, the HCDR3 of SEQ ID NO: 2309, the LCDR1 of SEQ ID NO: 2310, the LCDR2 of SEQ ID NO: 2311 and the LCDR3 of SEQ ID NO: 2312, and the second antigen binding domain that specifically binds CD3 comprises the HCDR1 of SEQ ID NO: 2291, the HCDR2 of SEQ ID NO: 2292, the HCDR3 of SEQ ID NO: 2293, the LCDR1 of SEQ ID NO: 2294, the LCDR2 of SEQ ID NO: 2295 and the LCDR3 of SEQ ID NO: 2296, and wherein the antigen expressed by the undesired cell is BCMA.

[0359] The disclosure also provides an isolated molecule, comprising: a first antigen binding domain, a second antigen binding domain and a third antigen binding domain, wherein the first antigen binding domain specifically binds CD8, the second antigen binding domain specifically binds CD3, and the third antigen binding domain specifically binds an antigen expressed by an undesired cell, wherein the isolated molecule activates or recruits CD8⁺ CTLs upon co-engagement of CD3 and CD8 and is unable to activate or recruit CD8⁺ CTLs in the absence of co-engagement of CD3 and CD8, wherein the first antigen binding domain that specifically binds CD8 comprises the HCDR1 of SEQ ID NO: 2307, the HCDR2 of SEQ ID NO: 2308, the HCDR3 of SEQ ID NO: 2309, the LCDR1 of SEQ ID NO: 2310, the LCDR2 of SEQ ID NO: 2311 and the LCDR3 of SEQ ID NO: 2312, and the second antigen binding domain that specifically binds CD3 comprises the HCDR1 of SEQ ID NO: 2291, the HCDR2 of SEQ ID NO: 2292, the HCDR3 of SEQ ID NO: 2293, the LCDR1 of SEQ ID NO: 2294, the LCDR2 of SEQ ID NO: 2295 and the LCDR3 of SEQ ID NO: 2296, and wherein the antigen expressed by the undesired cell is BCMA.

[0360] The disclosure also provides an isolated molecule, comprising: a first antigen binding domain, a second antigen binding domain and a third antigen binding domain, wherein the first antigen binding domain specifically binds CD8, the second antigen binding domain specifically binds CD3 and the third antigen binding domain specifically binds an antigen expressed by an undesired cell, wherein the first antigen binding domain specifically binds CD8 and the second antigen binding domain specifically binds CD3 with affinities that result in activation or recruitment of CD8⁺ CTLs only upon co-engagement of CD3 and CD8, wherein the first antigen binding domain that specifically binds CD8 comprises the HCDR1 of SEQ ID NO: 2307, the HCDR2 of SEQ ID NO: 2308, the HCDR3 of SEQ ID NO: 2309, the LCDR1 of SEQ ID NO: 2310, the LCDR2 of SEQ ID NO: 2311 and the LCDR3 of SEQ ID NO: 2312, and the second antigen binding domain that specifically binds CD3 comprises the HCDR1 of SEQ ID NO: 2291, the HCDR2 of SEQ ID NO: 2292, the HCDR3 of SEQ ID NO: 2293, the LCDR1 of SEQ ID NO: 2294, the LCDR2 of SEQ ID NO: 2295 and the LCDR3 of SEQ ID NO: 2296, and wherein the antigen expressed by the undesired cell is BCMA.

[0361] The disclosure also provides an isolated multispecific antibody, comprising: a first half molecule and a second half molecule, wherein the first half molecule comprises a first antigen binding domain and a second antigen binding domain and the second half molecule comprises a third antigen binding domain, wherein the first antigen binding domain specifically binds CD8, the second antigen binding domain specifically binds CD3, and the third antigen binding domain specifically binds an antigen expressed by an undesired cell, wherein the first antigen binding domain that specifically binds CD8 comprises the HCDR1 of SEQ ID NO: 2307, the HCDR2 of SEQ ID NO: 2308, the HCDR3 of SEQ ID NO: 2309, the LCDR1 of SEQ ID NO: 2310, the LCDR2 of SEQ ID NO: 2311 and the LCDR3 of SEQ ID NO: 2312, and the second antigen binding domain that specifically binds CD3 comprises the HCDR1 of SEQ ID NO: 2291, the HCDR2 of SEQ ID NO: 2292, the HCDR3 of SEQ ID NO: 2293, the LCDR1 of SEQ ID NO: 2294, the LCDR2 of SEQ ID NO: 2295 and the LCDR3 of SEQ ID NO: 2296, and wherein the antigen expressed by the undesired cell is BCMA.

[0362] The disclosure also provides an isolated multispecific antibody, comprising: a first half molecule and a second half molecule, wherein the first half molecule comprises a first antigen binding domain and a second antigen binding domain and the second half molecule comprises a third antigen binding domain, wherein the first antigen binding domain specifically binds CD8, the second antigen binding domain specifically binds CD3, and the third antigen binding domain specifically binds an antigen expressed by an undesired cell, wherein the isolated multispecific antibody activates or recruits CD8⁺ CTLs upon co-engagement of CD3 and CD8, wherein the first antigen binding domain that specifically binds CD8 comprises the HCDR1 of SEQ ID NO: 2307, the HCDR2 of SEQ ID NO: 2308, the HCDR3 of SEQ ID NO: 2309, the LCDR1 of SEQ ID NO: 2310, the LCDR2 of SEQ ID NO: 2311 and the LCDR3 of SEQ ID NO: 2312, and the second antigen binding domain that specifically binds CD3 comprises the HCDR1 of SEQ ID NO: 2291, the HCDR2 of SEQ ID NO: 2292, the HCDR3 of SEQ ID NO: 2293, the LCDR1 of SEQ ID NO: 2294, the LCDR2 of SEQ ID NO: 2295 and the LCDR3 of SEQ ID NO: 2296, and wherein the antigen expressed by the undesired cell is BCMA.

[0363] The disclosure also provides an isolated multispecific antibody, comprising: a first half molecule and a second half molecule, wherein the first half molecule comprises a first antigen binding domain and a second antigen binding domain and the second half molecule comprises a third antigen binding domain, wherein the first antigen binding domain specifically binds CD8, the second antigen binding domain specifically binds CD3, and the third antigen binding domain specifically binds an antigen expressed by an undesired cell, wherein the isolated multispecific antibody activates or recruits CD8⁺ CTLs upon co-engagement of CD3 and CD8 and wherein the isolated multispecific antibody is unable to activate or recruit CD8⁺ CTLs in the absence of co-engagement of CD3 and CD8, wherein the first antigen binding domain that specifically binds CD8 comprises the HCDR1 of SEQ ID NO: 2307, the HCDR2 of SEQ ID NO: 2308, the HCDR3 of SEQ ID NO: 2309, the LCDR1 of SEQ ID NO: 2310, the LCDR2 of SEQ ID NO: 2311 and the LCDR3 of SEQ ID NO: 2312, and the second antigen binding domain that specifically binds CD3 comprises the HCDR1 of SEQ ID NO: 2291, the HCDR2 of SEQ ID NO: 2292, the HCDR3 of SEQ ID NO: 2293, the LCDR1 of SEQ ID NO: 2294, the LCDR2 of SEQ ID NO: 2295 and the LCDR3 of SEQ ID NO: 2296, and wherein the antigen expressed by the undesired cell is BCMA.

[0364] The disclosure also provides an isolated multispecific antibody, comprising: a first half molecule and a second half molecule, wherein the first half molecule comprises a first antigen binding domain and a second antigen binding domain and the second half molecule comprises a third antigen binding domain, wherein the first antigen binding domain specifically binds CD8, the second antigen binding domain specifically binds CD3, and the third antigen binding domain specifically binds an antigen expressed by an undesired cell, wherein the first antigen binding domain specifically binds CD8 and the second antigen binding domain specifically binds CD3 with affinities that result in activation or recruitment of CD8⁺ CTLs only upon co-engagement of CD3 and CD8, wherein the first antigen binding domain that specifically binds CD8 comprises the HCDR1 of SEQ ID NO: 2307, the HCDR2 of SEQ ID NO: 2308, the HCDR3 of SEQ ID NO: 2309, the LCDR1 of SEQ ID NO: 2310, the LCDR2 of SEQ ID NO: 2311 and the LCDR3 of SEQ ID NO: 2312, and the second antigen binding domain that specifically binds CD3 comprises the HCDR1 of SEQ ID NO: 2291, the HCDR2 of SEQ ID NO: 2292, the HCDR3 of SEQ ID NO: 2293, the LCDR1 of SEQ ID NO: 2294, the LCDR2 of SEQ ID NO: 2295 and the LCDR3 of SEQ ID NO: 2296, and wherein the antigen expressed by the undesired cell is BCMA.

[0365] The disclosure also provides an isolated molecule, comprising: a first antigen binding domain, a second antigen binding domain and a third antigen binding domain, wherein the first antigen binding domain specifically binds CD8, the second antigen binding domain specifically binds a TCR complex, and the third antigen binding domain specifically binds an antigen expressed by an undesired cell, and wherein the antigen expressed by the undesired cell is PSMA. Exemplary first antigen binding domains and second antigen binding domains are provided herein. It is contemplated that an isolated molecule provided herein can comprise any first antigen binding domain specifically binds CD8 provided herein, and any second antigen binding domain specifically binds aTCR complex provided herein. In certain embodiments, the isolated molecule comprises a first antigen binding domain that specifically binds CD8 provided herein.

[0366] The disclosure also provides an isolated molecule, comprising: a first antigen binding domain, a second antigen binding domain and a third antigen binding domain, wherein the first antigen binding domain specifically binds CD8, the second antigen binding domain specifically binds a TCR complex, and the third antigen binding domain specifically binds an antigen expressed by an undesired cell, wherein the isolated molecule activates or recruits CD8⁺ CTLs upon co-engagement of the TCR complex and CD8, and wherein the antigen expressed by the undesired cell is PSMA. Exemplary first antigen binding domains and second antigen binding domains are provided herein. It is contemplated that an isolated molecule provided herein can comprise any first antigen binding domain specifically binds CD8 provided herein, and any second antigen binding domain specifically binds aTCR complex provided herein. In certain embodiments, the isolated molecule comprises a first antigen binding domain that specifically binds CD8 provided herein.

[0367] The disclosure also provides an isolated molecule, comprising: a first antigen binding domain, a second antigen binding domain and a third antigen binding domain, wherein the first antigen binding domain specifically binds CD8, the second antigen binding domain specifically binds a TCR complex, and the third antigen binding domain specifically binds an antigen expressed by an undesired cell, wherein the isolated molecule activates or recruits CD8⁺ CTLs upon co-engagement of the TCR complex and CD8 and is unable to activate or recruit CD8⁺ CTLs in the absence of co-engagement of the TCR complex and CD8, and wherein the antigen expressed by the undesired cell is PSMA. Exemplary first antigen binding domains and second antigen binding domains are provided herein. It is contemplated that an isolated molecule provided herein can comprise any first antigen binding domain specifically binds CD8 provided herein, and any second antigen binding domain specifically binds aTCR complex provided herein. In certain embodiments, the isolated molecule antibody comprises a first antigen binding domain that specifically binds CD8 provided herein.

[0368] The disclosure also provides an isolated molecule, comprising: a first antigen binding domain, a second antigen binding domain and a third antigen binding domain, wherein the first antigen binding domain specifically binds CD8, the second antigen binding domain specifically binds a TCR complex, and the third antigen binding domain specifically binds an antigen expressed by an undesired cell, wherein the first antigen binding domain specifically binds CD8 and the second antigen binding domain specifically binds the TCR with affinities that result in activation or recruitment of CD8⁺ CTLs only upon co-engagement of the TCR complex and CD8, and wherein the antigen expressed by the undesired cell is PSMA. Exemplary first antigen binding domains and second antigen binding domains are provided herein. It is contemplated that an isolated molecule provided herein can comprise any first antigen binding domain specifically binds CD8 provided herein, and any second antigen binding domain specifically binds aTCR complex provided herein. In certain embodiments, the isolated molecule comprises a first antigen binding domain that specifically binds CD8 provided herein.

[0369] The disclosure also provides an isolated multispecific antibody, comprising: a first half molecule and a second half molecule, wherein the first half molecule comprises a first antigen binding domain and a second antigen binding domain and the second half molecule comprises a third antigen binding domain, wherein the first antigen binding domain specifically binds CD8, the second antigen binding domain specifically binds a TCR complex, and the third antigen binding domain specifically binds an antigen expressed by an undesired cell, and wherein the antigen expressed by the undesired cell is PSMA. Exemplary first antigen binding domains and second antigen binding domains are provided herein. It is contemplated that an isolated molecule provided herein can comprise any first antigen binding domain specifically binds CD8 provided herein, and any second antigen binding domain specifically binds aTCR complex provided herein. In certain embodiments, the isolated multispecific antibody comprises a first antigen binding domain that specifically binds CD8 provided herein.

[0370] The disclosure also provides an isolated multispecific antibody, comprising: a first half molecule and a second half molecule, wherein the first half molecule comprises a first antigen binding domain and a second antigen binding domain and the second half molecule comprises a third antigen binding domain, wherein the first antigen binding domain specifically binds CD8, the second antigen binding domain specifically binds a TCR complex, and the third antigen binding domain specifically binds an antigen expressed by an undesired cell, wherein the isolated multispecific antibody activates or recruits CD8⁺ CTLs upon co-engagement of the TCR complex and CD8, and wherein the antigen expressed by the undesired cell is PSMA. Exemplary first antigen binding domains and second antigen binding domains are provided herein. It is contemplated that an isolated molecule provided herein can comprise any first antigen binding domain specifically binds CD8 provided herein, and any second antigen binding domain specifically binds aTCR complex provided herein. In certain embodiments, the isolated multispecific antibody comprises a first antigen binding domain that specifically binds CD8 provided herein.

[0371] The disclosure also provides an isolated multispecific antibody, comprising: a first half molecule and a second half molecule, wherein the first half molecule comprises a first antigen binding domain and a second antigen binding domain and the second half molecule comprises a third antigen binding domain, wherein the first antigen binding domain specifically binds CD8, the second antigen binding domain specifically binds a TCR complex, and the third antigen binding domain specifically binds an antigen expressed by an undesired cell, wherein the isolated multispecific antibody activates or recruits CD8⁺ CTLs upon co-engagement of the TCR complex and CD8 and wherein the isolated multispecific antibody is unable to activate or recruit CD8⁺ CTLs in the absence of co-engagement of the TCR complex and CD8, and wherein the antigen expressed by the undesired cell is PSMA. Exemplary first antigen binding domains and second antigen binding domains are provided herein. It is contemplated that an isolated molecule provided herein can comprise any first antigen binding domain specifically binds CD8 provided herein, and any second antigen binding domain specifically binds aTCR complex provided herein. In certain embodiments, the isolated multispecific antibody comprises a first antigen binding domain that specifically binds CD8 provided herein.

[0372] The disclosure also provides an isolated multispecific antibody, comprising: a first half molecule and a second half molecule, wherein the first half molecule comprises a first antigen binding domain and a second antigen binding domain and the second half molecule comprises a third antigen binding domain, wherein the first antigen binding domain specifically binds CD8, the second antigen binding domain specifically binds a TCR complex, and the third antigen binding domain specifically binds an antigen expressed by an undesired cell, wherein the first antigen binding domain specifically binds CD8 and the second antigen binding domain specifically binds the TCR complex with affinities that result in activation or recruitment of CD8⁺ CTLs only upon co-engagement of the TCR complex and CD8, and wherein the antigen expressed by the undesired cell is PSMA. Exemplary first antigen binding domains and second antigen binding domains are provided herein. It is contemplated that an isolated molecule provided herein can comprise any first antigen binding domain specifically binds CD8 provided herein, and any second antigen binding domain specifically binds aTCR complex provided herein. In certain embodiments, the isolated multispecific antibody comprises a first antigen binding domain that specifically binds CD8 provided herein.

[0373] The disclosure also provides an isolated molecule, comprising: a first antigen binding domain, a second antigen binding domain and a third antigen binding domain, wherein the first antigen binding domain specifically binds CD8, the second antigen binding domain specifically binds CD3, and the third antigen binding domain specifically binds an antigen expressed by an undesired cell, and wherein the antigen expressed by the undesired cell is PSMA. Exemplary first antigen binding domains and second antigen binding domains are provided herein. It is contemplated that an isolated molecule provided herein can comprise any first antigen binding domain specifically binds CD8 provided herein, and any second antigen binding domain specifically binds CD3 provided herein. In certain embodiments, the isolated molecule comprises a first antigen binding domain that specifically binds CD8 provided herein.

[0374] The disclosure also provides an isolated molecule, comprising: a first antigen binding domain, a second antigen binding domain and a third antigen binding domain, wherein the first antigen binding domain specifically binds CD8, the second antigen binding domain specifically binds CD3, and the third antigen binding domain specifically binds an antigen expressed by an undesired cell, wherein the isolated molecule activates or recruits CD8⁺ CTLs upon co-engagement of CD3 and CD8, and wherein the antigen expressed by the undesired cell is PSMA. Exemplary first antigen binding domains and second antigen binding domains are provided herein. It is contemplated that an isolated molecule provided herein can comprise any first antigen binding domain specifically binds CD8 provided herein, and any second antigen binding domain specifically binds CD3 provided herein. In certain embodiments, the isolated molecule comprises a first antigen binding domain that specifically binds CD8 provided herein.

[0375] The disclosure also provides an isolated molecule, comprising: a first antigen binding domain, a second antigen binding domain and a third antigen binding domain, wherein the first antigen binding domain specifically binds CD8, the second antigen binding domain specifically binds CD3, and the third antigen binding domain specifically binds an antigen expressed by an undesired cell, wherein the isolated molecule activates or recruits CD8⁺ CTLs upon co-engagement of CD3 and CD8 and is unable to activate or recruit CD8⁺ CTLs in the absence of co-engagement of CD3 and CD8, and wherein the antigen expressed by the undesired cell is PSMA. Exemplary first antigen binding domains and second antigen binding domains are provided herein. It is contemplated that an isolated molecule provided herein can comprise any first antigen binding domain specifically binds CD8 provided herein, and any second antigen binding domain specifically binds CD3 provided herein. In certain embodiments, the isolated molecule comprises a first antigen binding domain that specifically binds CD8 provided herein.

[0376] The disclosure also provides an isolated molecule, comprising: a first antigen binding domain, a second antigen binding domain and a third antigen binding domain, wherein the first antigen binding domain specifically binds CD8, the second antigen binding domain specifically binds CD3 and the third antigen binding domain specifically binds an antigen expressed by an undesired cell, wherein the first antigen binding domain specifically binds CD8 and the second antigen binding domain specifically binds CD3 with affinities that result in activation or recruitment of CD8⁺ CTLs only upon co-engagement of CD3 and CD8, and wherein the antigen expressed by the undesired cell is PSMA. Exemplary first antigen binding domains and second antigen binding domains are provided herein. It is contemplated that an isolated molecule provided herein can comprise any first antigen binding domain specifically binds CD8 provided herein, and any second antigen binding domain specifically binds CD3 provided herein. In certain embodiments, the isolated molecule comprises a first antigen binding domain that specifically binds CD8 provided herein.

[0377] The disclosure also provides an isolated multispecific antibody, comprising: a first half molecule and a second half molecule, wherein the first half molecule comprises a first antigen binding domain and a second antigen binding domain and the second half molecule comprises a third antigen binding domain, wherein the first antigen binding domain specifically binds CD8, the second antigen binding domain specifically binds CD3, and the third antigen binding domain specifically binds an antigen expressed by an undesired cell, and wherein the antigen expressed by the undesired cell is PSMA. Exemplary first antigen binding domains and second antigen binding domains are provided herein. It is contemplated that an isolated molecule provided herein can comprise any first antigen binding domain specifically binds CD8 provided herein, and any second antigen binding domain specifically binds CD3 provided herein. In certain embodiments, the isolated multispecific antibody comprises a first antigen binding domain that specifically binds CD8 provided herein.

[0378] The disclosure also provides an isolated multispecific antibody, comprising: a first half molecule and a second half molecule, wherein the first half molecule comprises a first antigen binding domain and a second antigen binding domain and the second half molecule comprises a third antigen binding domain, wherein the first antigen binding domain specifically binds CD8, the second antigen binding domain specifically binds CD3, and the third antigen binding domain specifically binds an antigen expressed by an undesired cell, wherein the isolated multispecific antibody activates or recruits CD8⁺ CTLs upon co-engagement of CD3 and CD8, and wherein the antigen expressed by the undesired cell is PSMA. Exemplary first antigen binding domains and second antigen binding domains are provided herein. It is contemplated that an isolated molecule provided herein can comprise any first antigen binding domain specifically binds CD8 provided herein, and any second antigen binding domain specifically binds CD3 provided herein. In certain embodiments, the isolated multispecific antibody comprises a first antigen binding domain that specifically binds CD8 provided herein.

[0379] The disclosure also provides an isolated multispecific antibody, comprising: a first half molecule and a second half molecule, wherein the first half molecule comprises a first antigen binding domain and a second antigen binding domain and the second half molecule comprises a third antigen binding domain, wherein the first antigen binding domain specifically binds CD8, the second antigen binding domain specifically binds CD3, and the third antigen binding domain specifically binds an antigen expressed by an undesired cell, wherein the isolated multispecific antibody activates or recruits CD8⁺ CTLs upon co-engagement of CD3 and CD8 and wherein the isolated multispecific antibody is unable to activate or recruit CD8⁺ CTLs in the absence of co-engagement of CD3 and CD8, and wherein the antigen expressed by the undesired cell is PSMA. Exemplary first antigen binding domains and second antigen binding domains are provided herein. It is contemplated that an isolated molecule provided herein can comprise any first antigen binding domain specifically binds CD8 provided herein, and any second antigen binding domain specifically binds CD3 provided herein. In certain embodiments, the isolated multispecific antibody comprises a first antigen binding domain that specifically binds CD8 provided herein.

[0380] The disclosure also provides an isolated multispecific antibody, comprising: a first half molecule and a second half molecule, wherein the first half molecule comprises a first antigen binding domain and a second antigen binding domain and the second half molecule comprises a third antigen binding domain, wherein the first antigen binding domain specifically binds CD8, the second antigen binding domain specifically binds CD3, and the third antigen binding domain specifically binds an antigen expressed by an undesired cell, wherein the first antigen binding domain specifically binds CD8 and the second antigen binding domain specifically binds CD3 with affinities that result in activation or recruitment of CD8⁺ CTLs only upon co-engagement of CD3 and CD8, and wherein the antigen expressed by the undesired cell is PSMA. Exemplary first antigen binding domains and second antigen binding domains are provided herein. It is contemplated that an isolated molecule provided herein can comprise any first antigen binding domain specifically binds CD8 provided herein, and any second antigen binding domain specifically binds CD3 provided herein. In certain embodiments, the isolated multispecific antibody comprises a first antigen binding domain that specifically binds CD8 provided herein.

[0381] The disclosure also provides an isolated molecule, comprising: a first antigen binding domain, a second antigen binding domain and a third antigen binding domain, wherein the first antigen binding domain specifically binds CD8, the second antigen binding domain specifically binds CD3, and the third antigen binding domain specifically binds an antigen expressed by an undesired cell, wherein the second antigen binding domain that specifically binds CD3 comprises the HCDR1 of SEQ ID NO: 2291, the HCDR2 of SEQ ID NO: 2292, the HCDR3 of SEQ ID NO: 2293, the LCDR1 of SEQ ID NO: 2294, the LCDR2 of SEQ ID NO: 2295 and the LCDR3 of SEQ ID NO: 2296, and wherein the antigen expressed by the undesired cell is PSMA. In certain embodiments, the isolated molecule comprises a first antigen binding domain that specifically binds CD8 provided herein.

[0382] The disclosure also provides an isolated molecule, comprising: a first antigen binding domain, a second antigen binding domain and a third antigen binding domain, wherein the first antigen binding domain specifically binds CD8, the second antigen binding domain specifically binds CD3, and the third antigen binding domain specifically binds an antigen expressed by an undesired cell, wherein the isolated molecule activates or recruits CD8⁺ CTLs upon co-engagement of CD3 and CD8, wherein the second antigen binding domain that specifically binds CD3 comprises the HCDR1 of SEQ ID NO: 2291, the HCDR2 of SEQ ID NO: 2292, the HCDR3 of SEQ ID NO: 2293, the LCDR1 of SEQ ID NO: 2294, the LCDR2 of SEQ ID NO: 2295 and the LCDR3 of SEQ ID NO: 2296, and wherein the antigen expressed by the undesired cell is PSMA. In certain embodiments, the isolated molecule comprises a first antigen binding domain that specifically binds CD8 provided herein.

[0383] The disclosure also provides an isolated molecule, comprising: a first antigen binding domain, a second antigen binding domain and a third antigen binding domain, wherein the first antigen binding domain specifically binds CD8, the second antigen binding domain specifically binds CD3, and the third antigen binding domain specifically binds an antigen expressed by an undesired cell, wherein the isolated molecule activates or recruits CD8⁺ CTLs upon co-engagement of CD3 and CD8 and is unable to activate or recruit CD8⁺ CTLs in the absence of co-engagement of CD3 and CD8, wherein the second antigen binding domain that specifically binds CD3 comprises the HCDR1 of SEQ ID NO: 2291, the HCDR2 of SEQ ID NO: 2292, the HCDR3 of SEQ ID NO: 2293, the LCDR1 of SEQ ID NO: 2294, the LCDR2 of SEQ ID NO: 2295 and the LCDR3 of SEQ ID NO: 2296, and wherein the antigen expressed by the undesired cell is PSMA. In certain embodiments, the isolated molecule comprises a first antigen binding domain that specifically binds CD8 provided herein.

[0384] The disclosure also provides an isolated molecule, comprising: a first antigen binding domain, a second antigen binding domain and a third antigen binding domain, wherein the first antigen binding domain specifically binds CD8, the second antigen binding domain specifically binds CD3 and the third antigen binding domain specifically binds an antigen expressed by an undesired cell, wherein the first antigen binding domain specifically binds CD8 and the second antigen binding domain specifically binds CD3 with affinities that result in activation or recruitment of CD8⁺ CTLs only upon co-engagement of CD3 and CD8, wherein the second antigen binding domain that specifically binds CD3 comprises the HCDR1 of SEQ ID NO: 2291, the HCDR2 of SEQ ID NO: 2292, the HCDR3 of SEQ ID NO: 2293, the LCDR1 of SEQ ID NO: 2294, the LCDR2 of SEQ ID NO: 2295 and the LCDR3 of SEQ ID NO: 2296, and wherein the antigen expressed by the undesired cell is PSMA. In certain embodiments, the isolated molecule comprises a first antigen binding domain that specifically binds CD8 provided herein.

[0385] The disclosure also provides an isolated multispecific antibody, comprising: a first half molecule and a second half molecule, wherein the first half molecule comprises a first antigen binding domain and a second antigen binding domain and the second half molecule comprises a third antigen binding domain, wherein the first antigen binding domain specifically binds CD8, the second antigen binding domain specifically binds CD3, and the third antigen binding domain specifically binds an antigen expressed by an undesired cell, wherein the second antigen binding domain that specifically binds CD3 comprises the HCDR1 of SEQ ID NO: 2291, the HCDR2 of SEQ ID NO: 2292, the HCDR3 of SEQ ID NO: 2293, the LCDR1 of SEQ ID NO: 2294, the LCDR2 of SEQ ID NO: 2295 and the LCDR3 of SEQ ID NO: 2296, and wherein the antigen expressed by the undesired cell is PSMA. In certain embodiments, the isolated multispecific antibody comprises a first antigen binding domain that specifically binds CD8 provided herein.

[0386] The disclosure also provides an isolated multispecific antibody, comprising: a first half molecule and a second half molecule, wherein the first half molecule comprises a first antigen binding domain and a second antigen binding domain and the second half molecule comprises a third antigen binding domain, wherein the first antigen binding domain specifically binds CD8, the second antigen binding domain specifically binds CD3, and the third antigen binding domain specifically binds an antigen expressed by an undesired cell, wherein the isolated multispecific antibody activates or recruits CD8⁺ CTLs upon co-engagement of CD3 and CD8, wherein the second antigen binding domain that specifically binds CD3 comprises the HCDR1 of SEQ ID NO: 2291, the HCDR2 of SEQ ID NO: 2292, the HCDR3 of SEQ ID NO: 2293, the LCDR1 of SEQ ID NO: 2294, the LCDR2 of SEQ ID NO: 2295 and the LCDR3 of SEQ ID NO: 2296, and wherein the antigen expressed by the undesired cell is PSMA. In certain embodiments, the isolated multispecific antibody comprises a first antigen binding domain that specifically binds CD8 provided herein.

[0387] The disclosure also provides an isolated multispecific antibody, comprising: a first half molecule and a second half molecule, wherein the first half molecule comprises a first antigen binding domain and a second antigen binding domain and the second half molecule comprises a third antigen binding domain, wherein the first antigen binding domain specifically binds CD8, the second antigen binding domain specifically binds CD3, and the third antigen binding domain specifically binds an antigen expressed by an undesired cell, wherein the isolated multispecific antibody activates or recruits CD8⁺ CTLs upon co-engagement of CD3 and CD8 and wherein the isolated multispecific antibody is unable to activate or recruit CD8⁺ CTLs in the absence of co-engagement of CD3 and CD8, wherein the second antigen binding domain that specifically binds CD3 comprises the HCDR1 of SEQ ID NO: 2291, the HCDR2 of SEQ ID NO: 2292, the HCDR3 of SEQ ID NO: 2293, the LCDR1 of SEQ ID NO: 2294, the LCDR2 of SEQ ID NO: 2295 and the LCDR3 of SEQ ID NO: 2296, and wherein the antigen expressed by the undesired cell is PSMA. In certain embodiments, the isolated multispecific antibody comprises a first antigen binding domain that specifically binds CD8 provided herein.

[0388] The disclosure also provides an isolated multispecific antibody, comprising: a first half molecule and a second half molecule, wherein the first half molecule comprises a first antigen binding domain and a second antigen binding domain and the second half molecule comprises a third antigen binding domain, wherein the first antigen binding domain specifically binds CD8, the second antigen binding domain specifically binds CD3, and the third antigen binding domain specifically binds an antigen expressed by an undesired cell, wherein the first antigen binding domain specifically binds CD8 and the second antigen binding domain specifically binds CD3 with affinities that result in activation or recruitment of CD8⁺ CTLs only upon co-engagement of CD3 and CD8, wherein the second antigen binding domain that specifically binds CD3 comprises the HCDR1 of SEQ ID NO: 2291, the HCDR2 of SEQ ID NO: 2292, the HCDR3 of SEQ ID NO: 2293, the LCDR1 of SEQ ID NO: 2294, the LCDR2 of SEQ ID NO: 2295 and the LCDR3 of SEQ ID NO: 2296, and wherein the antigen expressed by the undesired cell is PSMA. In certain embodiments, the isolated multispecific antibody comprises a first antigen binding domain that specifically binds CD8 provided herein.

[0389] The disclosure also provides an isolated molecule, comprising: a first antigen binding domain, a second antigen binding domain and a third antigen binding domain, wherein the first antigen binding domain specifically binds CD8, the second antigen binding domain specifically binds CD3, and the third antigen binding domain specifically binds an antigen expressed by an undesired cell, wherein the second antigen binding domain that specifically binds CD3 comprises the VH of SEQ ID NO: 2297 and the VL of SEQ ID NO: 2298, and wherein the antigen expressed by the undesired cell is PSMA. In certain embodiments, the isolated molecule comprises a first antigen binding domain that specifically binds CD8 provided herein.

[0390] The disclosure also provides an isolated molecule, comprising: a first antigen binding domain, a second antigen binding domain and a third antigen binding domain, wherein the first antigen binding domain specifically binds CD8, the second antigen binding domain specifically binds CD3, and the third antigen binding domain specifically binds an antigen expressed by an undesired cell, wherein the isolated molecule activates or recruits CD8⁺ CTLs upon co-engagement of CD3 and CD8, wherein the second antigen binding domain that specifically binds CD3 comprises the VH of SEQ ID NO: 2297 and the VL of SEQ ID NO: 2298, and wherein the antigen expressed by the undesired cell is PSMA. In certain embodiments, the isolated molecule comprises a first antigen binding domain that specifically binds CD8 provided herein.

[0391] The disclosure also provides an isolated molecule, comprising: a first antigen binding domain, a second antigen binding domain and a third antigen binding domain, wherein the first antigen binding domain specifically binds CD8, the second antigen binding domain specifically binds CD3, and the third antigen binding domain specifically binds an antigen expressed by an undesired cell, wherein the isolated molecule activates or recruits CD8⁺ CTLs upon co-engagement of CD3 and CD8 and is unable to activate or recruit CD8⁺ CTLs in the absence of co-engagement of CD3 and CD8, wherein the second antigen binding domain that specifically binds CD3 comprises the VH of SEQ ID NO: 2297 and the VL of SEQ ID NO: 2298, and wherein the antigen expressed by the undesired cell is PSMA. In certain embodiments, the isolated molecule comprises a first antigen binding domain that specifically binds CD8 provided herein.

[0392] The disclosure also provides an isolated molecule, comprising: a first antigen binding domain, a second antigen binding domain and a third antigen binding domain, wherein the first antigen binding domain specifically binds CD8, the second antigen binding domain specifically binds CD3 and the third antigen binding domain specifically binds an antigen expressed by an undesired cell, wherein the first antigen binding domain specifically binds CD8 and the second antigen binding domain specifically binds CD3 with affinities that result in activation or recruitment of CD8⁺ CTLs only upon co-engagement of CD3 and CD8, wherein the second antigen binding domain that specifically binds CD3 comprises the VH of SEQ ID NO: 2297 and the VL of SEQ ID NO: 2298, and wherein the antigen expressed by the undesired cell is PSMA. In certain embodiments, the isolated molecule comprises a first antigen binding domain that specifically binds CD8 provided herein.

[0393] The disclosure also provides an isolated multispecific antibody, comprising: a first half molecule and a second half molecule, wherein the first half molecule comprises a first antigen binding domain and a second antigen binding domain and the second half molecule comprises a third antigen binding domain, wherein the first antigen binding domain specifically binds CD8, the second antigen binding domain specifically binds CD3, and the third antigen binding domain specifically binds an antigen expressed by an undesired cell, wherein the second antigen binding domain that specifically binds CD3 comprises the VH of SEQ ID NO: 2297 and the VL of SEQ ID NO: 2298, and wherein the antigen expressed by the undesired cell is PSMA. In certain embodiments, the isolated multispecific antibody comprises a first antigen binding domain that specifically binds CD8 provided herein.

[0394] The disclosure also provides an isolated multispecific antibody, comprising: a first half molecule and a second half molecule, wherein the first half molecule comprises a first antigen binding domain and a second antigen binding domain and the second half molecule comprises a third antigen binding domain, wherein the first antigen binding domain specifically binds CD8, the second antigen binding domain specifically binds CD3, and the third antigen binding domain specifically binds an antigen expressed by an undesired cell, wherein the isolated multispecific antibody activates or recruits CD8⁺ CTLs upon co-engagement of CD3 and CD8, wherein the second antigen binding domain that specifically binds CD3 comprises the VH of SEQ ID NO: 2297 and the VL of SEQ ID NO: 2298, and wherein the antigen expressed by the undesired cell is PSMA. In certain embodiments, the isolated multispecific antibody comprises a first antigen binding domain that specifically binds CD8 provided herein.

[0395] The disclosure also provides an isolated multispecific antibody, comprising: a first half molecule and a second half molecule, wherein the first half molecule comprises a first antigen binding domain and a second antigen binding domain and the second half molecule comprises a third antigen binding domain, wherein the first antigen binding domain specifically binds CD8, the second antigen binding domain specifically binds CD3, and the third antigen binding domain specifically binds an antigen expressed by an undesired cell, wherein the isolated multispecific antibody activates or recruits CD8⁺ CTLs upon co-engagement of CD3 and CD8 and wherein the isolated multispecific antibody is unable to activate or recruit CD8⁺ CTLs in the absence of co-engagement of CD3 and CD8, wherein the second antigen binding domain that specifically binds CD3 comprises the VH of SEQ ID NO: 2297 and the VL of SEQ ID NO: 2298, and wherein the antigen expressed by the undesired cell is PSMA. In certain embodiments, the isolated multispecific antibody comprises a first antigen binding domain that specifically binds CD8 provided herein.

[0396] The disclosure also provides an isolated multispecific antibody, comprising: a first half molecule and a second half molecule, wherein the first half molecule comprises a first antigen binding domain and a second antigen binding domain and the second half molecule comprises a third antigen binding domain, wherein the first antigen binding domain specifically binds CD8, the second antigen binding domain specifically binds CD3, and the third antigen binding domain specifically binds an antigen expressed by an undesired cell, wherein the first antigen binding domain specifically binds CD8 and the second antigen binding domain specifically binds CD3 with affinities that result in activation or recruitment of CD8⁺ CTLs only upon co-engagement of CD3 and CD8, wherein the second antigen binding domain that specifically binds CD3 comprises the VH of SEQ ID NO: 2297 and the VL of SEQ ID NO: 2298, and wherein the antigen expressed by the undesired cell is PSMA. In certain embodiments, the isolated multispecific antibody comprises a first antigen binding domain that specifically binds CD8 provided herein.

[0397] The disclosure also provides an isolated molecule, comprising: a first antigen binding domain, a second antigen binding domain and a third antigen binding domain, wherein the first antigen binding domain specifically binds CD8, the second antigen binding domain specifically binds CD3, and the third antigen binding domain specifically binds an antigen expressed by an undesired cell, wherein the first antigen binding domain that specifically binds CD8 comprises the HCDR1 of SEQ ID NO: 2307, the HCDR2 of SEQ ID NO: 2308, the HCDR3 of SEQ ID NO: 2309, the LCDR1 of SEQ ID NO: 2310, the LCDR2 of SEQ ID NO: 2311 and the LCDR3 of SEQ ID NO: 2312, and wherein the antigen expressed by the undesired cell is PSMA.

[0398] The disclosure also provides an isolated molecule, comprising: a first antigen binding domain, a second antigen binding domain and a third antigen binding domain, wherein the first antigen binding domain specifically binds CD8, the second antigen binding domain specifically binds CD3, and the third antigen binding domain specifically binds an antigen expressed by an undesired cell, wherein the isolated molecule activates or recruits CD8⁺ CTLs upon co-engagement of CD3 and CD8, wherein the first antigen binding domain that specifically binds CD8 comprises the HCDR1 of SEQ ID NO: 2307, the HCDR2 of SEQ ID NO: 2308, the HCDR3 of SEQ ID NO: 2309, the LCDR1 of SEQ ID NO: 2310, the LCDR2 of SEQ ID NO: 2311 and the LCDR3 of SEQ ID NO: 2312, and wherein the antigen expressed by the undesired cell is PSMA.

[0399] The disclosure also provides an isolated molecule, comprising: a first antigen binding domain, a second antigen binding domain and a third antigen binding domain, wherein the first antigen binding domain specifically binds CD8, the second antigen binding domain specifically binds CD3, and the third antigen binding domain specifically binds an antigen expressed by an undesired cell, wherein the isolated molecule activates or recruits CD8⁺ CTLs upon co-engagement of CD3 and CD8 and is unable to activate or recruit CD8⁺ CTLs in the absence of co-engagement of CD3 and CD8, wherein the first antigen binding domain that specifically binds CD8 comprises the HCDR1 of SEQ ID NO: 2307, the HCDR2 of SEQ ID NO: 2308, the HCDR3 of SEQ ID NO: 2309, the LCDR1 of SEQ ID NO: 2310, the LCDR2 of SEQ ID NO: 2311 and the LCDR3 of SEQ ID NO: 2312, and wherein the antigen expressed by the undesired cell is PSMA.

[0400] The disclosure also provides an isolated molecule, comprising: a first antigen binding domain, a second antigen binding domain and a third antigen binding domain, wherein the first antigen binding domain specifically binds CD8, the second antigen binding domain specifically binds CD3 and the third antigen binding domain specifically binds an antigen expressed by an undesired cell, wherein the first antigen binding domain specifically binds CD8 and the second antigen binding domain specifically binds CD3 with affinities that result in activation or recruitment of CD8⁺ CTLs only upon co-engagement of CD3 and CD8, wherein the first antigen binding domain that specifically binds CD8 comprises the HCDR1 of SEQ ID NO: 2307, the HCDR2 of SEQ ID NO: 2308, the HCDR3 of SEQ ID NO: 2309, the LCDR1 of SEQ ID NO: 2310, the LCDR2 of SEQ ID NO: 2311 and the LCDR3 of SEQ ID NO: 2312, and wherein the antigen expressed by the undesired cell is PSMA.

[0401] The disclosure also provides an isolated multispecific antibody, comprising: a first half molecule and a second half molecule, wherein the first half molecule comprises a first antigen binding domain and a second antigen binding domain and the second half molecule comprises a third antigen binding domain, wherein the first antigen binding domain specifically binds CD8, the second antigen binding domain specifically binds CD3, and the third antigen binding domain specifically binds an antigen expressed by an undesired cell, wherein the first antigen binding domain that specifically binds CD8 comprises the HCDR1 of SEQ ID NO: 2307, the HCDR2 of SEQ ID NO: 2308, the HCDR3 of SEQ ID NO: 2309, the LCDR1 of SEQ ID NO: 2310, the LCDR2 of SEQ ID NO: 2311 and the LCDR3 of SEQ ID NO: 2312, and wherein the antigen expressed by the undesired cell is PSMA.

[0402] The disclosure also provides an isolated multispecific antibody, comprising: a first half molecule and a second half molecule, wherein the first half molecule comprises a first antigen binding domain and a second antigen binding domain and the second half molecule comprises a third antigen binding domain, wherein the first antigen binding domain specifically binds CD8, the second antigen binding domain specifically binds CD3, and the third antigen binding domain specifically binds an antigen expressed by an undesired cell, wherein the isolated multispecific antibody activates or recruits CD8⁺ CTLs upon co-engagement of CD3 and CD8, wherein the first antigen binding domain that specifically binds CD8 comprises the HCDR1 of SEQ ID NO: 2307, the HCDR2 of SEQ ID NO: 2308, the HCDR3 of SEQ ID NO: 2309, the LCDR1 of SEQ ID NO: 2310, the LCDR2 of SEQ ID NO: 2311 and the LCDR3 of SEQ ID NO: 2312, and wherein the antigen expressed by the undesired cell is PSMA.

[0403] The disclosure also provides an isolated multispecific antibody, comprising: a first half molecule and a second half molecule, wherein the first half molecule comprises a first antigen binding domain and a second antigen binding domain and the second half molecule comprises a third antigen binding domain, wherein the first antigen binding domain specifically binds CD8, the second antigen binding domain specifically binds CD3, and the third antigen binding domain specifically binds an antigen expressed by an undesired cell, wherein the isolated multispecific antibody activates or recruits CD8⁺ CTLs upon co-engagement of CD3 and CD8 and wherein the isolated multispecific antibody is unable to activate or recruit CD8⁺ CTLs in the absence of co-engagement of CD3 and CD8, wherein the first antigen binding domain that specifically binds CD8 comprises the HCDR1 of SEQ ID NO: 2307, the HCDR2 of SEQ ID NO: 2308, the HCDR3 of SEQ ID NO: 2309, the LCDR1 of SEQ ID NO: 2310, the LCDR2 of SEQ ID NO: 2311 and the LCDR3 of SEQ ID NO: 2312, and wherein the antigen expressed by the undesired cell is PSMA.

[0404] The disclosure also provides an isolated multispecific antibody, comprising: a first half molecule and a second half molecule, wherein the first half molecule comprises a first antigen binding domain and a second antigen binding domain and the second half molecule comprises a third antigen binding domain, wherein the first antigen binding domain specifically binds CD8, the second antigen binding domain specifically binds CD3, and the third antigen binding domain specifically binds an antigen expressed by an undesired cell, wherein the first antigen binding domain specifically binds CD8 and the second antigen binding domain specifically binds CD3 with affinities that result in activation or recruitment of CD8⁺ CTLs only upon co-engagement of CD3 and CD8, wherein the first antigen binding domain that specifically binds CD8 comprises the HCDR1 of SEQ ID NO: 2307, the HCDR2 of SEQ ID NO: 2308, the HCDR3 of SEQ ID NO: 2309, the LCDR1 of SEQ ID NO: 2310, the LCDR2 of SEQ ID NO: 2311 and the LCDR3 of SEQ ID NO: 2312, and wherein the antigen expressed by the undesired cell is PSMA.

[0405] The disclosure also provides an isolated molecule, comprising: a first antigen binding domain, a second antigen binding domain and a third antigen binding domain, wherein the first antigen binding domain specifically binds CD8, the second antigen binding domain specifically binds CD3, and the third antigen binding domain specifically binds an antigen expressed by an undesired cell, wherein the first antigen binding domain that specifically binds CD8 comprises the HCDR1 of SEQ ID NO: 2307, the HCDR2 of SEQ ID NO: 2308, the HCDR3 of SEQ ID NO: 2309, the LCDR1 of SEQ ID NO: 2310, the LCDR2 of SEQ ID NO: 2311 and the LCDR3 of SEQ ID NO: 2312, and the second antigen binding domain that specifically binds CD3 comprises the HCDR1 of SEQ ID NO: 2291, the HCDR2 of SEQ ID NO: 2292, the HCDR3 of SEQ ID NO: 2293, the LCDR1 of SEQ ID NO: 2294, the LCDR2 of SEQ ID NO: 2295 and the LCDR3 of SEQ ID NO: 2296, and wherein the antigen expressed by the undesired cell is PSMA.

[0406] The disclosure also provides an isolated molecule, comprising: a first antigen binding domain, a second antigen binding domain and a third antigen binding domain, wherein the first antigen binding domain specifically binds CD8, the second antigen binding domain specifically binds CD3, and the third antigen binding domain specifically binds an antigen expressed by an undesired cell, wherein the isolated molecule activates or recruits CD8⁺ CTLs upon co-engagement of CD3 and CD8, wherein the first antigen binding domain that specifically binds CD8 comprises the HCDR1 of SEQ ID NO: 2307, the HCDR2 of SEQ ID NO: 2308, the HCDR3 of SEQ ID NO: 2309, the LCDR1 of SEQ ID NO: 2310, the LCDR2 of SEQ ID NO: 2311 and the LCDR3 of SEQ ID NO: 2312, and the second antigen binding domain that specifically binds CD3 comprises the HCDR1 of SEQ ID NO: 2291, the HCDR2 of SEQ ID NO: 2292, the HCDR3 of SEQ ID NO: 2293, the LCDR1 of SEQ ID NO: 2294, the LCDR2 of SEQ ID NO: 2295 and the LCDR3 of SEQ ID NO: 2296, and wherein the antigen expressed by the undesired cell is PSMA.

[0407] The disclosure also provides an isolated molecule, comprising: a first antigen binding domain, a second antigen binding domain and a third antigen binding domain, wherein the first antigen binding domain specifically binds CD8, the second antigen binding domain specifically binds CD3, and the third antigen binding domain specifically binds an antigen expressed by an undesired cell, wherein the isolated molecule activates or recruits CD8⁺ CTLs upon co-engagement of CD3 and CD8 and is unable to activate or recruit CD8⁺ CTLs in the absence of co-engagement of CD3 and CD8, wherein the first antigen binding domain that specifically binds CD8 comprises the HCDR1 of SEQ ID NO: 2307, the HCDR2 of SEQ ID NO: 2308, the HCDR3 of SEQ ID NO: 2309, the LCDR1 of SEQ ID NO: 2310, the LCDR2 of SEQ ID NO: 2311 and the LCDR3 of SEQ ID NO: 2312, and the second antigen binding domain that specifically binds CD3 comprises the HCDR1 of SEQ ID NO: 2291, the HCDR2 of SEQ ID NO: 2292, the HCDR3 of SEQ ID NO: 2293, the LCDR1 of SEQ ID NO: 2294, the LCDR2 of SEQ ID NO: 2295 and the LCDR3 of SEQ ID NO: 2296, and wherein the antigen expressed by the undesired cell is PSMA.

[0408] The disclosure also provides an isolated molecule, comprising: a first antigen binding domain, a second antigen binding domain and a third antigen binding domain, wherein the first antigen binding domain specifically binds CD8, the second antigen binding domain specifically binds CD3 and the third antigen binding domain specifically binds an antigen expressed by an undesired cell, wherein the first antigen binding domain specifically binds CD8 and the second antigen binding domain specifically binds CD3 with affinities that result in activation or recruitment of CD8⁺ CTLs only upon co-engagement of CD3 and CD8, wherein the first antigen binding domain that specifically binds CD8 comprises the HCDR1 of SEQ ID NO: 2307, the HCDR2 of SEQ ID NO: 2308, the HCDR3 of SEQ ID NO: 2309, the LCDR1 of SEQ ID NO: 2310, the LCDR2 of SEQ ID NO: 2311 and the LCDR3 of SEQ ID NO: 2312, and the second antigen binding domain that specifically binds CD3 comprises the HCDR1 of SEQ ID NO: 2291, the HCDR2 of SEQ ID NO: 2292, the HCDR3 of SEQ ID NO: 2293, the LCDR1 of SEQ ID NO: 2294, the LCDR2 of SEQ ID NO: 2295 and the LCDR3 of SEQ ID NO: 2296, and wherein the antigen expressed by the undesired cell is PSMA.

[0409] The disclosure also provides an isolated multispecific antibody, comprising: a first half molecule and a second half molecule, wherein the first half molecule comprises a first antigen binding domain and a second antigen binding domain and the second half molecule comprises a third antigen binding domain, wherein the first antigen binding domain specifically binds CD8, the second antigen binding domain specifically binds CD3, and the third antigen binding domain specifically binds an antigen expressed by an undesired cell, wherein the first antigen binding domain that specifically binds CD8 comprises the HCDR1 of SEQ ID NO: 2307, the HCDR2 of SEQ ID NO: 2308, the HCDR3 of SEQ ID NO: 2309, the LCDR1 of SEQ ID NO: 2310, the LCDR2 of SEQ ID NO: 2311 and the LCDR3 of SEQ ID NO: 2312, and the second antigen binding domain that specifically binds CD3 comprises the HCDR1 of SEQ ID NO: 2291, the HCDR2 of SEQ ID NO: 2292, the HCDR3 of SEQ ID NO: 2293, the LCDR1 of SEQ ID NO: 2294, the LCDR2 of SEQ ID NO: 2295 and the LCDR3 of SEQ ID NO: 2296, and wherein the antigen expressed by the undesired cell is PSMA.

[0410] The disclosure also provides an isolated multispecific antibody, comprising: a first half molecule and a second half molecule, wherein the first half molecule comprises a first antigen binding domain and a second antigen binding domain and the second half molecule comprises a third antigen binding domain, wherein the first antigen binding domain specifically binds CD8, the second antigen binding domain specifically binds CD3, and the third antigen binding domain specifically binds an antigen expressed by an undesired cell, wherein the isolated multispecific antibody activates or recruits CD8⁺ CTLs upon co-engagement of CD3 and CD8, wherein the first antigen binding domain that specifically binds CD8 comprises the HCDR1 of SEQ ID NO: 2307, the HCDR2 of SEQ ID NO: 2308, the HCDR3 of SEQ ID NO: 2309, the LCDR1 of SEQ ID NO: 2310, the LCDR2 of SEQ ID NO: 2311 and the LCDR3 of SEQ ID NO: 2312, and the second antigen binding domain that specifically binds CD3 comprises the HCDR1 of SEQ ID NO: 2291, the HCDR2 of SEQ ID NO: 2292, the HCDR3 of SEQ ID NO: 2293, the LCDR1 of SEQ ID NO: 2294, the LCDR2 of SEQ ID NO: 2295 and the LCDR3 of SEQ ID NO: 2296, and wherein the antigen expressed by the undesired cell is PSMA.

[0411] The disclosure also provides an isolated multispecific antibody, comprising: a first half molecule and a second half molecule, wherein the first half molecule comprises a first antigen binding domain and a second antigen binding domain and the second half molecule comprises a third antigen binding domain, wherein the first antigen binding domain specifically binds CD8, the second antigen binding domain specifically binds CD3, and the third antigen binding domain specifically binds an antigen expressed by an undesired cell, wherein the isolated multispecific antibody activates or recruits CD8⁺ CTLs upon co-engagement of CD3 and CD8 and wherein the isolated multispecific antibody is unable to activate or recruit CD8⁺ CTLs in the absence of co-engagement of CD3 and CD8, wherein the first antigen binding domain that specifically binds CD8 comprises the HCDR1 of SEQ ID NO: 2307, the HCDR2 of SEQ ID NO: 2308, the HCDR3 of SEQ ID NO: 2309, the LCDR1 of SEQ ID NO: 2310, the LCDR2 of SEQ ID NO: 2311 and the LCDR3 of SEQ ID NO: 2312, and the second antigen binding domain that specifically binds CD3 comprises the HCDR1 of SEQ ID NO: 2291, the HCDR2 of SEQ ID NO: 2292, the HCDR3 of SEQ ID NO: 2293, the LCDR1 of SEQ ID NO: 2294, the LCDR2 of SEQ ID NO: 2295 and the LCDR3 of SEQ ID NO: 2296, and wherein the antigen expressed by the undesired cell is PSMA.

[0412] The disclosure also provides an isolated multispecific antibody, comprising: a first half molecule and a second half molecule, wherein the first half molecule comprises a first antigen binding domain and a second antigen binding domain and the second half molecule comprises a third antigen binding domain, wherein the first antigen binding domain specifically binds CD8, the second antigen binding domain specifically binds CD3, and the third antigen binding domain specifically binds an antigen expressed by an undesired cell, wherein the first antigen binding domain specifically binds CD8 and the second antigen binding domain specifically binds CD3 with affinities that result in activation or recruitment of CD8⁺ CTLs only upon co-engagement of CD3 and CD8, wherein the first antigen binding domain that specifically binds CD8 comprises the HCDR1 of SEQ ID NO: 2307, the HCDR2 of SEQ ID NO: 2308, the HCDR3 of SEQ ID NO: 2309, the LCDR1 of SEQ ID NO: 2310, the LCDR2 of SEQ ID NO: 2311 and the LCDR3 of SEQ ID NO: 2312, and the second antigen binding domain that specifically binds CD3 comprises the HCDR1 of SEQ ID NO: 2291, the HCDR2 of SEQ ID NO: 2292, the HCDR3 of SEQ ID NO: 2293, the LCDR1 of SEQ ID NO: 2294, the LCDR2 of SEQ ID NO: 2295 and the LCDR3 of SEQ ID NO: 2296, and wherein the antigen expressed by the undesired cell is PSMA.

[0413] The isolated molecule or the isolated multispecific antibody of the disclosure may be targeted to any undesired cell via the antigen binding domain that specifically binds an antigen expressed by the undesired cell. The isolated molecule or the multispecific antibody of the disclosure may be further engineered to comprise additional antigen binding domains which may, for example, bind a second antigen expressed by the undesired cell. In some embodiments, the undesired cell is a pathogenic cell. In some embodiments, the pathogenic cell is a cancer cell, a virus infected cell, an immune cell, an inflamed cell, a damaged cells, a foreign cell, an apoptotic cell, a dysplastic cell, an immunogenic cell, a metaplastic cell or a mutant cell, or any combination thereof.

[0414] In some embodiments, the isolated molecule or the isolated multispecific antibody of the disclosure may bind an antigen that is inert in a system the antibody is used, such as a virus coat protein, such as RSV. The isolated molecule or the isolated multispecific antibody incorporating an inert arm may be used as a research tool as is known and described herein.

[0415] In some embodiments, the undesired cell is a cancer cell. In some embodiments, the cancer cell is a malignant cancer cell. In some embodiments, the cancer cell originates from a solid tumor. In some embodiments, the cancer cell originates from a hematological malignancy.

[0416] In some embodiments, the cancer cell originates from adenocarcinoma, anal cancer, basal cell carcinoma, biliary tract cancer, bladder cancer, bone cancer, breast cancer, cancer associated with infection, cancer of the adrenal gland, cancer of the endocrine system, cancer of the head or neck, cancer of the parathyroid gland, cancer of the penis, cancer of the thyroid gland, cancer of the urethra, cervical cancer, carcinoma of the breast, carcinoma of the fallopian tubes, carcinoma of the liver, carcinoma of the lung, carcinoma of the prostate, carcinoma of the renal pelvis, carcinoma of the vagina, carcinoma of the vulva, choriocarcinoma, clear cell carcinoma, colon cancer, colon carcinoma, colorectal cancer, connective tissue cancer, cutaneous or intraocular malignant melanoma, environmentally induced cancer, gastric cancer, gastrointestinal cancer, glioma, glioblastoma, endometrial cancer, epithelial cancer, esophageal cancer, eye cancer, larynx cancer, liver cancer, hepatocellular carcinoma, hormone refractory prostate adenocarcinoma, Kaposi's sarcoma, kidney cancer, lung cancer gastro-esophageal cancer, melanoma, mesothelioma, Merkel cell cancer, neuroblastoma, non-small cell lung cancer (NSCLC), osteosarcoma, ovarian cancer, pancreatic cancer, prostate cancer, rectal cancer, renal cell carcinoma, retinoblastoma rhabdomyosarcoma, squamous cell cancer, soft tissue sarcoma, solid tumors of childhood, spinal axis tumor, stomach cancer, testicular cancer, thyroid cancer, uterine cancer, urothelial carcinoma or sarcomas, or any combination thereof.

[0417] In some embodiments, the cancer cell originates from B cell malignancies. In some embodiments, the cancer cell originates from T cell malignancies. In some embodiments, the cancer cell originates from NK cell malignancies. In some embodiments, the cancer cell originates from acute lymphoblastic leukemia, acute myeloid leukemia, anaplastic large-cell lymphoma, Burkitt's lymphoma, chronic lymphocytic leukemia, chronic myeloid leukemia, diffuse large B-cell lymphoma, dendritic cell neoplasm, follicular lymphoma, hairy cell leukemia, Hodgkin's lymphoma, leukemia, B cell leukemia, T cell leukemia, light chain amyloidosis, lymphoma, B cell lymphoma, NK cell lymphoma, T cell lymphoma, mantle-cell lymphoma, marginal zone B-cell lymphoma, monoclonal gammopathy of undetermined significance, mucosa-associated lymphatic tissue lymphoma, multiple myeloma, myelodysplastic syndrome, non-Hodgkin's lymphoma, plasma cell leukemia, precursor B-cell lymphoblastic leukemia, smoldering multiple myeloma or Waldenstrom's macroglobulinemia.

[0418] In some embodiments, the undesired cell is an infected cell. In some embodiments, the undesired cell is infected with bacteria, virus, fungi, protozoa, parasite or prion. In some embodiments, the undesired cell is a bacterial infected cell. In some embodiments, the undesired cell is a virus infected cell.

[0419] In some embodiments, the virus infected cell is infected with adenovirus, arboviral encephalitis virus, coronavirus, coxsackie virus, cytomegalovirus (CMV), dengue virus, echovirus, Epstein Barr virus, flaviviruses, human immunodeficiency virus (HIV), hepatitis A virus, hepatitis B virus, hepatitis C virus, herpes virus, HTLV virus, influenza virus, JC virus, measles virus, molluscum virus, mumps virus, papillomavirus, parvovirus, poliovirus, rabies virus, respiratory syncytial virus, rhinovirus, rotavirus, rubella virus or vaccinia virus.

[0420] In some embodiments, the undesired cell is an immune cell. In some embodiments, the undesired cell is an activated immune cell. In some embodiments, the immune cell is a CD4⁺ cell. CD4⁺ expressing cells include Th1, Th2, Th9, Th17, T-follicular helper (Tfh), Treg, central memory (Tcm), effector memory (Tem), tissue resident memory (Trm), T peripheral helper (Tph) and memory stem cells (Tscm). In some embodiments, the immune cell is a Th1 cell. In some embodiments, the immune cell is a Th2 cell. In some embodiments, the immune cell is a Th9 cell. In some embodiments, the immune cell is a Th17 cell. In some embodiments, the immune cells is a Treg cell. In some embodiments, the immune cells is an antigen-presenting cell. In some embodiments, the immune cells is a macrophage. In some embodiments, the immune cells is a M1 macrophage. In some embodiments, the immune cells is a M2 macrophage. In some embodiments, the immune cells is a dendritic cell. In some embodiments, the immune cell is a B cell. In some embodiments, the immune cell is a natural killer (NK) cell. In some embodiments, the immune cells is a B regulatory (Breg) cell. In some embodiments, the immune cell is a myeloid derived suppressor cell (MDSC) cell. In some embodiments, the immune cell is a neutrophil. In some embodiments, the immune cell is a mast cell. In some embodiments, the immune cell is a CD8⁺ T cell that lacks expression of CD3. In some embodiments, the immune cell is an activated T cell. In some embodiments, the immune cell is a granulocyte.

[0421] In some embodiments, the undesired cell is a platelet. In some embodiments, the undesired cell is an endothelial cell. In some embodiments, the undesired cell is an epithelial cell.

[0422] In some embodiments, the undesired cell is a cell that contributes to pathogenesis of an immune-mediated disease, such as an inflammatory disease, an autoimmune disease or any condition resulting in tissue damage destruction, or any combination thereof.

[0423] In some embodiments, the undesired cell is a B cell that contributes to pathogenesis of multiple sclerosis, type 1 diabetes or rheumatoid arthritis.

[0424] In some embodiments, the undesired cell is a γδ T cell that contributes to pathogenesis of an autoimmune disease, such as rheumatoid arthritis or systemic lupus erythematosus (SLE).

[0425] In some embodiments, the undesired cell is a PD-1⁺CD4⁺ T cell, such as Tfh or Tph cell, that promotes B cell responses and antibody production and contribute to autoimmune diseases driven by autoantibody production, including rheumatoid arthritis, systemic lupus erythematosus, and Sjogren's Syndrome (see e.g., US2019/0298850).

[0426] In some embodiments, the antigen expressed by an undesired cell is a tumor-associated antigens (TAAs) or tumor-specific antigens (TSAs). In some embodiments, the antigen expressed by an undesired cell comprises mesothelin, alpha-fetoprotein (ALP), BAGE, BCR-ABL, beta-catenin, beta-HCG, BrE3-antigen, BCA225, BCMA, BTAA, CA125, CA195, CA242, CA-50, CAM43, CAMEL, CAP-1, carbonic anhydrase IX, CA19-9, CA72-4, CAM 17.1, CASP-8, CCCL19, CCCL21, CD1, CD 1a, CD2, CD4, CD5, CD11A, CD14, CD15, CD16, CD18, CD19, CD20, CD21, CD22, CD23, CD25, CD29, CD30, CD32b, CD33, CD37, CD38, CD40, CD40L, CD44, CD45, CD46, CD47, CD52, CD54, CD55, CD59, CD64, CD66a-e, CD67, CD68, CD70, CD70L, CD74, CD79a, CD79b, CD80, CD83, CD95, CD123, CD126, CD132, CD133, CD138, CD147, CD154, CDC27, CDK4, CDK4m, CDKN2A, CO-029, CTLA4, CXCR4, CXCR7, CXCL12, HIF-1a, colon-specific antigen-p (CSAp), CEACAM5) CEACAM6, c-Met, DAM, E2A-PRL, EGFR, EGFRvIII, EGP-1, EGP-2, ELF2-M, Ep-CAM, FGF, FGF-5, Flt-1, Flt-3, folate receptor, G250 antigen, Ga733VEpCAM, GAGE, gplOO, GRO-b, H4-RET, HLA-DR, HM1.24, human chorionic gonadotropin (HCG) HER2, HER3, HMGB-1, HIF-1, HSP70-2M, HST-2, HTgp-175, la, IGF-1R, IFN-g, IFN-α, IFN-b, IFN-1, IL-4R, IL-6R, IL-13R, IL-15R, IL-17R, IL-18R, IL-2, IL-6, IL-8, IL-12, IL-15, IL-17, IL-18, IL-23, IL-25, insulin-like growth factor-1 (IGF-1), KC4-antigen, KLK2, KSA, KS-1-antigen, KS1-4, LAGE-1a, Le-Y, LDR/FUT, M344, MA-50, macrophage migration inhibitory factor (MIF), MAGE, MAGE-1, MAGE-3, MAGE-4, MAGE-5, MAGE-6, MART-1, MART-2, TRAG-3, MCP-1, MIP-1A, MIP-1B, MIF, MG7-Ag, MOV18, MUC1, MUC2, MUC3, MUC4, MUC5ac, MUC13, MUC16, MUM-1/2, MUM-3, MYL-RAR, NB/70K, Nm23H1, NuMA, NCA66, NCA95, NCA90, NY-ESO-1, p15, p16, p185erbB2, p180erbB3, PAM4 antigen, pancreatic cancer mucin, PD-1, PD-L1, PD-L2, PI5, placental growth factor, p53, PLAGL2, Pmel17 prostatic acid phosphatase, PSA, PRAME, PSMA, PlGF, ILGF, ILGF-1R, IL-6, IL-25, RCAS1, RS5, RAGE, RANTES, Ras, T101, SAGE, S100, SLAMF7, survivin, survivin-2B, SDDCAG16, TA-90\Mac2 binding protein, TAAL6, TAC, TAG-72, TLP, tenascin, TMEFF2, TRAIL receptors, TRP-1, TRP-2, TSP-180, VEGFR, ED-B fibronectin, WT-1, 17-1A-antigen, C3, C3a, C3b, C5a, C5, bcl-2, K-ras, tumor neoantigen or a viral antigen associated with cancer.

[0427] In some embodiments, the antigen expressed by an undesired cell is a viral antigen or a bacterial antigen. In some embodiments, the tumor antigen is a viral antigen derived from a virus associated with a human chronic disease or cancer (such as cervical cancer). For example, in some embodiments, the viral antigen is derived from Epstein-Barr virus (EBV), HPV antigens E6 and/or E7, hepatitis C virus (HCV), hepatitis B virus (HBV), or cytomegalovirus (CMV).

[0428] In some embodiments, the antigen expressed by an undesired cell is an antigen expressed by undesired immune cells. In some embodiments, the antigen expressed by undesired immune cells is CD19, CD20, CD38, BCMA, FcγRIIB, CD4, IL-12β2R, IL-18R, CD25, CTLA-4, CD40L, CD28, CD56, CD38, CD14, CD33, CD11c, CD123, CD66b, CD41, CD61, CD62, CD235a, CD146, CD326, CD23 or CD203c.

[0429] Exemplary cancers or tumors and specific tumor antigens associated with such tumors (but not exclusively), include acute lymphoblastic leukemia (etv6, amll, cyclophilin b), B cell lymphoma (Ig-idiotype), glioma (E-cadherin, a-catenin, b-catenin, g-catenin, p120ctn), bladder cancer (p21ras), biliary cancer (p21ras), breast cancer (MUC family, HER2/neu, c-erbB-2), cervical carcinoma (p53, p21ras), colon carcinoma (p21ras, HER2/neu, c-erbB-2, MUC family), colorectal cancer (Colorectal associated antigen (CRC)-CO17-1A/GA733, APC), choriocarcinoma (CEA), epithelial cell cancer (cyclophilin b), gastric cancer (HER2/neu, c-erbB-2, ga733 glycoprotein), hepatocellular cancer (a-fetoprotein), Hodgkins lymphoma (Imp-1, EBNA-1), lung cancer (CEA, MAGE-3, NY-ESO-1), lymphoid cell-derived leukemia (cyclophilin b), melanoma (p5 protein, gp75, oncofetal antigen, GM2 and GD2 gangliosides, Melan-A/MART-1, cdc27, MAGE-3, p21ras, gplOO), myeloma (MUC family, p21ras), non-small cell lung carcinoma (HER2/neu, c-erbB-2), nasopharyngeal cancer (Imp-1, EBNA-1), ovarian cancer (MUC family, HER2/neu, c-erbB-2), prostate cancer (KLK2, Prostate Specific Antigen (PSA) and its antigenic epitopes PSA-1, PSA-2, and PSA-3, PSMA, HER2/neu, c-erbB-2, ga733 glycoprotein, TMEFF2), renal cancer (HER2/neu, c-erbB-2), squamous cell cancers of the cervix and esophagus, testicular cancer (NY-ESO-1), T cell leukemia (HTLV-1 epitopes), and viral products or proteins, multiple myeloma (CD38, BCMA), AML (CD33, flt3), B cell malignancies (CD19, CD20, CD38), light chain amyloidosis (CD38).

[0430] Neoantigens presented on various tumor cells in the context of MHC may also be targeted using the isolated molecules or the multispecific antibodies of the disclosure. In these instances, the first antigen binding domain that specifically binds an antigen on undesired cells specifically binds a peptide/MHC complex expressed by the undesired cells. In these instances the isolated molecules or the multispecific antibodies of the disclosure may be used to target undesired cells harboring intracellular mutant, dysfunctional or foreign proteins. Exemplary neoantigens which may be targeted are disclosed for example in U.S. Ser. No. 10/155,031, US20180153975, US20190030147 and WO2017173321.

[0431] Exemplary antigens on undesired B cells comprise CD19, CD20, CD38, BCMA and FcγRII.

[0432] Exemplary antigens on undesired CD4⁺ T cells comprise CD4, IL-12β2R and IL-18R.

[0433] Exemplary antigens on undesired activated T cells comprise CD25, CTLA-4 and CD40L.

[0434] Exemplary antigens on undesired T cells comprise CD28.

[0435] Exemplary antigens on undesired NK cells comprise CD56 and CD38.

[0436] Exemplary antigens on undesired macrophages comprise CD14 and CD33.

[0437] Exemplary antigens on undesired monocytes comprise CD14 and CD33.

[0438] Exemplary antigens on undesired dendritic cells comprise CD11c and CD123.

[0439] Exemplary antigens on undesired granulocytes comprise CD66b.

[0440] Exemplary antigens on undesired platelets comprise CD41, CD61 and CD62.

[0441] Exemplary antigens on undesired erythrocytes comprise CD235a.

[0442] Exemplary antigens on undesired endothelial cells comprise CD146.

[0443] Exemplary antigens on undesired epithelial cells comprise CD326.

[0444] Exemplary antigens on undesired mast cells comprise FcεR1, CD23 and CD203c.

[0445] Exemplary antigens on undesired Tfh or Tph cells comprise PD-1.

### Methods of Making Molecules of the Disclosure

[0446] Antigen Binding Domains that Specifically Bind the TCR Complex, CD8 or an Antigen Expressed by an Undesired Cell.

[0447] The antigen binding domains that specifically bind the TCR complex, CD8 or the antigen expressed by the undesired cell may be generated using known molecular biology technologies. The various antigen binding domains may be already known domains or they may be selected de novo using known methods.

[0448] Antigen binding domains of desired specificity may be selected from a phage, mammalian or E. coli libraries expressing human immunoglobulins or portions thereof such as Fabs, single chain antibodies (scFv), unpaired or paired antibody variable regions, camelid VHH domains or non-antibody scaffolds. The libraries may be screened for binding to the desired antigen and the obtained positive clones may be further characterized, re-engineered into various antigen binding domain formats as described herein and incorporated into the isolated molecules or isolated multispecific antibodies of the disclosure.

[0449] The hybridoma method of Kohler and Milstein may be used to identify VH/VL pairs from non-human species having the desired specificity.

[0450] Antigen binding domains of desired specificity may also be generated by immunizing non-human animals and subsequently humanized. Exemplary humanization techniques including selection of human acceptor frameworks include CDR grafting (U.S. Pat. No. 5,225,539), SDR grafting (U.S. Pat. No. 6,818,749), Resurfacing (Padlan, (1991) Mol Immunol 28:489-499), Specificity Determining Residues Resurfacing (U.S. Patent Publ. No. 2010/0261620), human framework adaptation (U.S. Pat. No. 8,748,356) or superhumanization (U.S. Pat. No. 7,709,226). In these methods, CDRs or a subset of CDR residues of parental antibodies are transferred onto human frameworks that may be selected based on their overall homology to the parental frameworks, based on similarity in CDR length, or canonical structure identity, or a combination thereof.

[0451] Transgenic animals, such as mice, rat or chicken carrying human immunoglobulin (Ig) loci in their genome may be used to generate antigen binding domains of desired specificity and are described in for example U.S. Pat. No. 6,150,584, Int. Patent Publ. No. WO1999/45962, Int. Patent Publ. Nos. WO2002/066630, WO2002/43478, WO2002/043478 and WO1990/04036. The endogenous immunoglobulin loci in such animal may be disrupted or deleted, and at least one complete or partial human immunoglobulin locus may be inserted into the genome of the animal using homologous or non-homologous recombination, using transchromosomes, or using minigenes. Companies such as Regeneron (http://_www_regeneron_com), Harbour Antibodies (http://_www_harbourantibodies_com), Open Monoclonal Technology, Inc. (OMT) (http://_www_omtinc_net), KyMab (http://_www_kymab_com), Trianni (http://_www.trianni_com) and Ablexis (http://_www_ablexis_com) may be engaged to provide human antibodies directed against a selected antigen using technologies as described above.

[0452] Humanized antigen biding domains may be further optimized to improve their selectivity or affinity to a desired antigen by incorporating altered framework support residues to preserve binding affinity (backmutations) by techniques such as those described in Int. Patent Publ. Nos. WO1090/007861 and WO1992/22653, or by introducing variation at any of the CDRs for example to improve affinity of the antigen binding domain.

[0453] Preparation of antigens (e.g., the TCR complex, CD8 and an antigen expressed by an undesired cell), their expression and production of antigen binding domains of the disclosure may be performed using any suitable technique, such as recombinant protein production. The antigens may be administered to an animal in the form of purified protein, or protein mixtures including whole cells or cell or tissue extracts, or the antigen may be formed de novo in the animal's body from nucleic acids encoding said antigen or a portion thereof.

[0454] Antigens presented on MCH, either class I or class II, may be prepared as recombinant antigen/MHC complexes using known methods, such as covalently coupling the antigen (i.e., peptide) to the MHC, optionally using cleavable linkers and expressing the complex as soluble molecules in a format such peptide-β2-α2-α1-β1 chain, peptide-α1-β1-α2-β2 or peptide-α1-α2-α3 as a heterodimer with β2 macroglobulin. Linkers which are at least 15 amino acids long may be used between the antigen and the MCH. Various additional expression formats are disclosed in U.S. Pat. Nos. 5,976,551, 5,734,023, 5,820,866, 7,141,656B2, U.S. Pat. No. 6,270,772B1 and U.S. Pat. No. 7,074,905B2.

### Molecular Formats

[0455] The molecules or the multispecific antibodies of the disclosure may be engineered into any multivalent format using any known or de novo identified antigen binding domain as long as molecules or the multispecific antibodies of the disclosure comprise the first antigen binding domain that specifically binds the undesired antigen, the second antigen binding domain that specifically binds the TCR complex and the third antigen binding domain that specifically binds CD8, and through selection of the first antigen binding domain and the second antigen binding domain, activate or recruit CD8⁺ CTLs cells only upon co-engagement of the TCR complex and CD8. Exemplary formats are disclosed herein, and include molecules into which the antigen binding domains are engineered as scFv, Fab, Fv, VHH, dAb, VH, VL, Fab or as non-antibody scaffold as disclosed herein onto one or more Fc domains or fragment thereof, or optionally onto other scaffolds such as half-life extending moieties including albumin, transferrin or PEG. In the multispecific antibodies of the disclosure containing a first half molecule and a second half molecule, the second antigen binding domain that specifically binds the TCR complex and the third antigen binding domain that specifically binds CD8 may be engineered into the second half molecule and the antigen binding domain that specifically binds the antigen un undesired cells may be engineered into the first half molecule to provide spatial closeness of the second antigen binding domain and the third antigen binding domain to facilitate co-engagement. Exemplary formats that may be used (and their binding specificity) are:

[0456] Format 1:

[0457] 1^{st} polypeptide: scFv(TCRcomplex)-VH(CD8)-CH1-hinge-CH2-CH3

[0458] 2^{nd} polypeptide: VL(CD8)-CL

[0459] 3^{rd} polypeptide: scFv(antigen on undesired cell)-Fc

[0460] Format 2:

[0461] 1^{st} polypeptide: VH(CD8)-CH1-hinge-CH2-CH3

[0462] 2^{nd} polypeptide: VL(CD8)-CL-scFv(TCRcomplex)

[0463] 3^{rd} polypeptide: scFv(antigen on undesired cell)-Fc

[0464] Format 3:

[0465] 1^{st} polypeptide: VH(CD8)-CH1-hinge-CH2-CH3-scFv(TCRcomplex)

[0466] 2^{nd} polypeptide: VL(CD8)-CL

[0467] 3^{rd} polypeptide: scFv(antigen on undesired cell)-Fc

[0468] Format 4:

[0469] 1^{st} polypeptide: scFv(TCRcomplex)-VH(CD8)-CH1-hinge-CH2-CH3

[0470] 2^{nd} polypeptide: VL(CD8)-CL

[0471] 3^{rd} polypeptide: scFv(inert)-Fc

[0472] Format 5:

[0473] 1^{st} polypeptide: VH(CD8)-CH1-hinge-CH2-CH3

[0474] 2^{nd} polypeptide: VL(CD8)-CL-scFv(TCRcomplex)

[0475] 3^{rd} polypeptide: scFv(inert)-Fc

[0476] Format 6:

[0477] 1^{st} polypeptide: VH(CD8)-CH1-hinge-CH2-CH3-scFv(TCRcomplex)

[0478] 2^{nd} polypeptide: VL(CD8)-CL

[0479] 3^{rd} polypeptide: scFv(inert)-Fc

[0480] Fab used in the isolated molecules or in the multispecific antibodies of the disclosure may also be engineered by exchanging the VL and the VH domains for each other or exchanging the CH1 and LC domains for each other, as described in Int. Pat. Publ. No. WO2009/080251. Correct Fab pairing may also be promoted by introducing one or more amino acid substitutions in the CH1, CL, VH or VL domains of the Fab. The amino acids that are modified are typically part of the VH:VL and CH1:CL interface such that the Fab components preferentially pair with each other rather than with components of other Fabs. The amino acid substitutions may be made at the conserved framework residues of the VH/VL and CH1/CL domains. The modifications introduced in the VH and CH1 and/or VL and CL domains may be complementary to each other and may be achieved on the basis of steric and hydrophobic contacts, electrostatic/charge interactions or a combination of the variety of interactions. The complementarity between protein surfaces is broadly described in the literature in terms of lock and key fit, knob into hole, protrusion and cavity, donor and acceptor etc., all implying the nature of structural and chemical match between the two interacting surfaces. Exemplary substitutions are described in WO2014/150973 and WO2014/082179, and include a T192E substitution in the CH1 domain and S114A and N137K substitutions in the CL domain, which introduces a salt-bridge between the CH1 and CL domains (see, Golay et al., 2016, J Immunol 196:3199-211). Alternatively, the Fab domain may comprise a 143Q and 188V substitutions in the CH1 domain and 113T and 176V substitutions in the CL domain, which serves to swap hydrophobic and polar regions of contact between the CH1 and CL domain (see, Golay et al., 2016, J Immunol 196:3199-211).

[0481] Fabs may also be engineered into a single chain Fab fragment, which is a polypeptide consisting of VH-CH1-VL-CL and an optional linker between the various domains. Exemplary single chain Fab fragments that may be used in the isolated molecules or in the multispecific antibodies of the disclosure include formats in N- to C-terminal order: VH-CH1-linker-VL-CL, VL-CL-linker-VH-CH1, VH-CL-linker-VL-CH1 or VL-CH1-linker-VH-CL. The linker may be a polypeptide of at least 30 amino acids, such as between about 32 and about 50 amino acids. The single chain Fab domains may be stabilized via the natural disulfide bond between the CL domain and the CH1 domain or alternatively, via an engineered disulfide bond between the VH and the VL between following positions: VH position 44 to VL position 100, VH position n105 to VL position 43, or VH position 101 to VL position 100 (numbering according to the EU index.

[0482] scFvs may be incorporated into the isolated molecules or into the multispecific antibodies of the disclosure in either order, e.g., from N- to C-terminus in the order VH-linker-VL or VL-linker-VH. scFvs incorporated into the molecules of the disclosure may be stabilized by engineering interdomain disulfide bonds between the VH and the VL. The disulfide bond may be engineered for example between the VH position H44 and the VL position L100, between the VH position H46 and the VL position L98, between the VH position H101 and the VL position L44, between the VH position H103 and the VL position L42, or between the VH position H103 and the VL position L43 (see. e.g., Zhao et al., Int J Mol Sci 12: 1-11, 2011).

[0483] VHH domains from Camelidae family, such as camels, llamas and alpacas, as well as other single domain antibodies may also be incorporated as antigen binding domains into the isolated molecules or in the multispecific antibodies of the disclosure. The VHH domains may be further engineered at hallmark residues, such as residues 11, 37, 44, 45 and 47 (residue numbering according to Kabat) (Muyldermans, Reviews Mol Biotech 74:277-302 (2001), U.S. Pat. No. 9,156,905).

[0484] Non-antibody scaffolds may also be used as antigen binding domains and incorporated into the molecules or the multispecific antibodies of the disclosure. Such scaffolds are typically derived from repeat proteins and include ankyrin repeat proteins (DARPins), Avimers (short for avidity multimers; domain A of LDL receptor), Anticalin/Lipocalins, Kunitz domains, Affibodies, Adnexins, Affilins, Affitins (also known as Nanofitins), Knottins, Pronectins, Versabodies, Duocalins, and Fynomers and fibronectin type III (Fn3) repeat based scaffold such as Centyrins. Non-antibody scaffolds that can be used include those described in Mintz and Crea, 2013, Bioprocess International 11(2):40-48).

[0485] Additional formats that incorporate the desired multispecificity into the molecules or the multispecific antibodies of the disclosure that may be used include those described in Int. Pat. Publ. WO2019/195535. For example, a Fab, Fv, scFv or non-antibody scaffolds (e.g., non-immunoglobulin based domains) may be attached to one or two Fc domains or fragments thereof or to a light chain or fragment thereof, either N- or C-terminally, to generate trispecific molecules. Antigen binding domains may also be conjugated head-to-tail into one Fc or fragment thereof or into one light chain or fragment thereof. Additional trispecific formats that may be used are formats disclosed in WO2014/145806; WO2017/124002; Liu et al., Front Immunol. 8:38, 2017; Brinkmann & Kontermann, 2017, mAbs 9:2, 182-212; US2016/0355600; Klein et al., 2016, MAbs 8(6):1010-20; and US2017/0145116, or formats further engineered by incorporating one or more additional antigen binding domains into the formats disclosed in any of the references.

[0486] The isolated molecules or the multispecific antibodies of the disclosure comprising a first half molecule and a second half molecule, or two Fc domains or fragments thereof, may be engineered to promote preferred association of the first half molecule and the second half molecule or the two Fc domains or fragments thereof by engineering mutations into the CH3 domains which promote heterodimerization of the first half molecule and the second half molecule or the two Fc domains or fragments thereof (instead of homodimerization) Exemplary CH3 mutations that may be used in the first half molecule and in the second half molecule include technologies such as Duobody® mutations (Genmab), Knob-in-Hole mutations (Genentech), electrostatically-matched mutations (Chugai, Amgen, NovoNordisk, Oncomed), the Strand Exchange Engineered Domain body (SEEDbody) (EMD Serono), and other asymmetric mutations (e.g., Zymeworks). Duobody® mutations (Genmab) are disclosed for example in U.S. Pat. No. 9,150,663 and US2014/0303356 and include mutations F405L/K409R, wild-type/F405L_R409K, T350I_K370T_F405L/K409R, K370W/K409R, D399AFGHILMNRSTVWY/K409R, T366ADEFGHILMQVY/K409R, L368ADEGHNRSTVQ/K409AGRH, D399FHKRQ/K409AGRH, F405IKLSTVW/K409AGRH and Y407LWQ/K409AGRH. Knob-in-hole mutations are disclosed for example in WO1996/027011 and include mutations on the interface of CH3 region in which an amino acid with a small side chain (hole) is introduced into the first CH3 region and an amino acid with a large side chain (knob) is introduced into the second CH3 region, resulting in preferential interaction between the first CH3 region and the second CH3 region. Exemplary CH3 region mutations forming a knob and a hole are T366Y/F405A, T366W/F405W, F405W/Y407A, T394W/Y407T, T394S/Y407A, T366W/T394S, F405W/T394S and T366W/T366S_L368A_Y407V. Heterodimer formation may be promoted by using electrostatic interactions by substituting positively charged residues on the first CH3 region and negatively charged residues on the second CH3 region as described in US2010/0015133, US2009/0182127, US2010/028637 or US2011/0123532. Other asymmetric mutations that may be used to promote heavy chain heterodimerization are L351Y_F405A_Y407V/T394W, T366I_K392M_T394W/F405A_Y407V, T366L_K392M_T394W/F405A_Y407V, L351Y_Y407A/T366A_K409F, L351Y_Y407A/T366V_K409F, Y407A/T366A_K409F, or T350V_L351Y_F405A_Y407V/T350V_T366L_K392L_T394W as described in US2012/0149876 or US2013/0195849. SEEDbody mutations involve substituting select IgG residues with IgA residues to promote heterodimerization as described in US20070287170. Other exemplary mutations that may be used are R409D_K370E/D399K_E357K, S354C_T366W/Y349C_T366S_L368A_Y407V, Y349C_T366W/S354C_T366S_L368A_Y407V, T366K/L351D, L351K/Y349E, L351K/Y349D, L351K/L368E, L351Y_Y407A/T366A_K409F, L351Y_Y407A/T366V_K409F, K392D/D399K, K392D/E356K, K253E_D282K_K322D/D239K_E240K_K292D, K392D_K409D/D356K_D399K as described in WO2007/147901, WO 2011/143545, WO2013157954, WO2013096291 and US2018/0118849.

### Linkers

[0487] The isolated molecules or the multispecific antibodies of the disclosure may also comprise linkers connecting one or more antigen binding domains to the VH, the VL, the CH1 domain, the CL domain, the CH2 domain, the CH3 domain, the Fc region or fragments thereof, albumin, PEG, transferrin, or to one another. Various linkers may be used, including synthetic sequences or sequences from native immunoglobulin hinge regions or fragments thereof, or modified hinge regions. Hinge regions may be derived from human or any other species, such as mouse, rat, rabbit, camel, llama, shark, goat or dog. Hinge regions may be of different isotype than the HC or Fc region that is used in the particular molecule of the disclosure. The hinge regions or fragments thereof may be modified by one or more substitution, such as substitutions that increase or decrease the number of cysteine residues in the hinge. Modified hinge regions are those disclosed for example in U.S. Pat. No. 5,677,425, WO9915549, WO2005003170, WO2005003169, WO2005003170, WO9825971 and WO2005003171. Exemplary hinge regions or fragments thereof or modified hinge regions are shown in Table 1.

TABLE 1

| | | SEQ |
|---|---|---|
| Hinge region name | Amino acid sequence | ID |
| H1 Human lgA1 | VPSTPPTPSPSTPPTPSPS | 2183 |
| H2 Human lgA2 | VPPPPP | 2184 |
| H3 Human IgD | ESPKAQASSVPTAQPQAEG | 2185 |
| | SLAKATTAPATTRNTGRGG | |
| | EEKKKEKEKEEQEERETKT | |
| | P | |
| H4 Human lgG1 | EPKSCDKTHTCPPCP | 2186 |
| H5 Human lgG2 | ERKCCVECPPCP | 2187 |
| H6 Human lgG3 | ELKTPLGDTTHTCPRCPEP | 2188 |
| | KSCDTPPPCPRCPEPKSCD | |
| | TPPPCPRCPEPKSCDTPPP | |
| | CPRCP | |
| H7 Human lgG4 | ESKYGPPCPSCP | 2189 |
| H8 Human lgG4(P) | ESKYGPPCPPCP | 2190 |
| H9 Engineered hinge v1 | CPPC | 2191 |
| H10 Engineered hinge v2 | CPSC | 2192 |
| H11 Engineered hinge v3 | CPRC | 2193 |
| H12 Engineered hinge v4 | SPPC | 2194 |
| H13 Engineered hinge v5 | CPPS | 2195 |
| H14 Engineered hinge v6 | SPPS | 2196 |
| H15 Engineered hinge v7 | DKTHTCAA | 2197 |
| H16 Engineered hinge v8 | DKTHTCPPCPA | 2198 |
| H17 Engineered hinge v9 | DKTHTCPPCPATCPPCPA | 2199 |
| H18 Engineered hinge | DKTHTCPPCPATCPPCPAT | 2200 |
| | CPPCPA | |
| H19 Engineered hinge | DKTHTCPPCPAGKPTLYNS | 2201 |
| | LVMSDTAGTCY | |
| H20 Engineered hinge | DKTHTCPPCPAGKPTHVNV | 2202 |
| | SVVMAEVDGTCY | |
| H21 Engineered hinge | DKTHTCCVECPPCPA | 2203 |
| H22 Engineered hinge | DKTHTCPRCPEPKSCDTPP | 2204 |
| | PCPRCPA | |
| H23 Engineered hinge | DKTHTCPSCPA | 2205 |

[0488] Synthetic linkers that may be used to connect the antigen binding domains to one another or the VH, the VL, the CH1 domain, the CL domain, the CH2 domain, the CH3 domain or the Fc region or fragments thereof include flexible and/or charged peptide linkers of varying length, such as linkers between from about 2 to about 60 amino acids. Synthetic linkers that may be used include those disclosed by Chen et al., 2013, Adv Drug Deliv Rev. 65(10): 1357-1369 and Klein et al., 2014, Protein Engineering, Design & Selection 27(10): 325-330. Exemplary suitable synthetic linkers are shown in Table 2.

TABLE 2

| Linker | | |
|---|---|---|
| name | Linker amino acid sequence | SEQ |
| L1 | ADAAP | 2206 |
| L2 | ADAAPTVSIFP | 2207 |
| L3 | ADAAPTVSIFPP | 2208 |
| L4 | AKTTAP | 2209 |
| L5 | AKTTAPSVYPLAP | 2210 |
| L6 | AKTTPKLEEGEFSEARV | 2211 |
| L7 | AKTTPKLGG | 2212 |
| L8 | AKTTPP | 2213 |
| L9 | AKTTPPSVTPLAP | 2214 |
| L10 | ASTKGP | 2215 |
| L11 | ASTKGPSVFPLAP | 2216 |
| L12 | ASTKGPSVFPLAPASTKGPSVFPLAP | 2217 |
| L13 | EGKSSGSGSESKST | 2218 |
| L14 | GEGESGEGESGEGES | 2219 |
| L15 | GEGESGEGESGEGESGEGES | 2220 |
| L16 | GEGGSGEGGSGEGGS | 2221 |
| L17 | GENKVEYAPALMALS | 2222 |
| L18 | GGEGSGGEGSGGEGS | 2223 |
| L19 | GGGESGGEGSGEGGS | 2224 |
| L20 | GGGESGGGESGGGES | 2225 |
| L21 | GGGGSGGGGS | 2226 |
| L22 | GGGGSGGGGSGGGGS | 2227 |
| L23 | GGGGSGGGGSGGGGSGGGGS | 2228 |
| L24 | GGGKSGGGKSGGGKS | 2229 |
| L25 | GGGKSGGKGSGKGGS | 2230 |
| L26 | GGKGSGGKGSGGKGS | 2231 |
| L27 | GGSGG | 2232 |
| L28 | GGSGGGGSGGGGS | 2233 |
| L29 | GHEAAAVMQVQYPAS | 2234 |
| L30 | GKGGSGKGGSGKGGS | 2235 |
| L31 | GKGKSGKGKSGKGKS | 2236 |
| L32 | GKGKSGKGKSGKGKSGKGKS | 2237 |
| L33 | GKPGSGKPGSGKPGS | 2238 |
| L34 | GKPGSGKPGSGKPGSGKPGS | 2239 |
| L35 | GPAKELTPLKEAKVS | 2240 |
| L36 | GSAGSAAGSGEF | 2241 |
| L37 | IRPRAIGGSKPRVA | 2242 |
| L38 | KESGSVSSEQLAQFRSLD | 2243 |
| L39 | KTTPKLEEGEFSEAR | 2244 |
| L40 | QPKAAP | 2245 |
| L41 | QPKAAPSVTLFPP | 2246 |
| L42 | RADAAAAGGPGS | 2247 |
| L43 | RADAAP | 2248 |
| L44 | RADAAPTVS | 2249 |
| L45 | SAKTTP | 2250 |
| L46 | SAKTTPKLEEGEFSEARV | 2251 |
| L47 | SAKTTPKLGG | 2252 |
| L48 | STAGDTHLGGEDFD | 2253 |
| L49 | TVAAP | 2254 |
| L50 | TVAAPSVFIFPP | 2255 |
| L51 | TVAAPSVFIFPPTVAAPSVFIFPP | 2256 |
| L52 | RADAAAA(G4S)4 | 2257 |
| L53 | GGSEGKSSGSGSESKSTGGS | 2258 |
| L54 | GGGSGGGS | 2259 |
| L55 | GGGSGGGSGGGS | 2260 |
| L56 | GGGSGGGSGGGSGGGS | 2261 |
| L57 | GGGSGGGSGGGSGGGSGGGS | 2262 |
| L58 | GGGGSGGGGSGGGGS | 2263 |
| L59 | GGGGSGGGGSGGGGSGGGGS | 2264 |
| L60 | GGGGSGGGGSGGGGSGGGGSGGGGS | 2265 |
| L61 | GSTSGSGKPGSGEGSTKG | 2266 |
| L62 | IRPRAIGGSKPRVA | 2267 |
| L63 | GKGGSGKGGSGKGGS | 2268 |
| L64 | GGKGSGGKGSGGKGS | 2269 |
| L65 | GGGKSGGGKSGGGKS | 2270 |
| L66 | GKGKSGKGKSGKGKS | 2271 |
| L67 | GGGKSGGKGSGKGGS | 2272 |
| L68 | GKPGSGKPGSGKPGS | 2273 |
| L69 | GKPGSGKPGSGKPGSGKPGS | 2274 |
| L70 | GKGKSGKGKSGKGKSGKGKS | 2275 |
| L71 | STAGDTHLGGEDFD | 2276 |
| L72 | GEGGSGEGGSGEGGS | 2277 |
| L73 | GGEGSGGEGSGGEGS | 2278 |
| L74 | GEGESGEGESGEGES | 2279 |
| L75 | GGGESGGEGSGEGGS | 2280 |
| L76 | GEGESGEGESGEGESGEGES | 2281 |
| L77 | GSTSGSGKPGSGEGSTKG | 2282 |
| L78 | PRGASKSGSASQTGSAPGS | 2283 |
| L79 | GTAAAGAGAAGGAAAGAAG | 2284 |
| L80 | GTSGSSGSGSGGSGSGGGG | 2285 |
| L81 | GKPGSGKPGSGKPGSGKPGS | 2286 |
| L82 | GSGS | 2287 |
| L83 | APAPAPAPAP | 2288 |
| L84 | APAPAPAPAPAPAPAPAPAP | 2289 |
| L85 | AEAAAKEAAAKEAAAAKEAAAAKEAAAAKAAA | 2290 |

### Isotypes, Allotypes and Fc Engineering

[0489] The isolated molecules or the isolated multispecific antibodies of the disclosure may be of any isotype or allotype in instances when a portion of a full heavy chain is present in the molecules or in the multispecific antibodies.

[0490] It is expected that allotype has no influence on properties of isolated molecules or the isolated multispecific antibodies of the disclosure, such as specific binding to an antigen or Fc-mediated effector functions or half-life. Allotype is related to amino acid sequence variations at specific locations in the constant region sequences of a heavy chain of an immunoglobulin. Table 3 shows select IgG1, IgG2 and IgG4 allotypes.

TABLE 3

| | Amino acid residue at position of diversity | | | | | | | |
|---|---|---|---|---|---|---|---|---|
| | (residue numbering: EU Index) | | | | | | | |
| | IgG2 | | IgG4 | | IgG1 | | | |
| Allotype | 189 | 282 | 309 | 422 | 214 | 356 | 358 | 431 |
| G2m(n) | T | M | | | | | | |
| G2m(n−) | P | V | | | | | | |
| G2m(n)/(n− | T | V | | | | | | |
| nG4m(a) | | | L | R | | | | |
| G1m(17) | | | | | K | E | M | A |
| G1m(17,1) | | | | | K | D | L | A |

[0491] When present, C-terminal lysine may be removed from the isolated molecules or the isolated multispecific antibodies of the disclosure by endogenous circulating carboxypeptidases in the blood stream (Cai et al., (2011) Biotechnol Bioeng 108:404-412). During manufacturing, CTL removal may be controlled to less than the maximum level by control of concentration of extracellular Zn²⁺, EDTA or EDTA-Fe³⁺ as described in U.S. Patent Publ. No. US20140273092. C-terminal lysine content of proteins may be measured using known methods. In some embodiments, the isolated molecule or the isolated multispecific antibody of the disclosure has a C-terminal lysine content from about 10% to about 90%. In some embodiments, the C-terminal lysine content is from about 20% to about 80%. In some embodiments, the C-terminal lysine content is from about 40% to about 70%. In some embodiments, the C-terminal lysine content is from about 55% to about 70%. In some embodiments, the C-terminal lysine content is about 60%.

[0492] The Fc region (Fc), when present in the isolated molecules or the isolated multispecific antibodies of the disclosure, may comprise at least one substitution in the Fc region which modulates Fc-mediated effector functions CDC, ACC, ADCP by modulating binding to activating or inhibitory FcγR or FcRn, or which modulates protein A binding to facilitate purification. Fc positions that may be substituted to reduce binding of the isolated molecule or the isolated multispecific antibody of the disclosure to the activating FcγR and subsequently to reduce effector function include positions 214, 233, 234, 235, 236, 237, 238, 265, 267, 268, 270, 295, 297, 309, 327, 328, 329, 330, 331 and 365. Exemplary substitutions that may be made singularly or in combination are substitutions K214T, E233P, L234V, L234A, deletion of G236, V234A, F234A, L235A, G237A, P238A, P238S, D265A, S267E, H268A, H268Q, Q268A, N297A, A327Q, P329A, D270A, Q295A, V309L, A327S, L328F, A330S and P331S in IgG1, IgG2, IgG3 or IgG4.

[0493] Exemplary combination substitutions that may be made to reduce ADCC are mutations L234A/L235A on IgG1, L234A/L235A/D265S on IgG1, V234A/G237A/P238S/H268A/V309L/A330S/P331S on IgG2, F234A/L235A on IgG4, S228P/F234A/L235A on IgG4, N297A on all Ig isotypes, V234A/G237A on IgG2, K214T/E233P/L234V/L235A/G236-deleted/A327G/P331A/D365E/L358M on IgG1, H268Q/V309L/A330S/P331S on IgG2, S267E/L328F on IgG1, L234F/L235E/D265A on IgG1, L234A/L235A/G237A/P238S/H268A/A330S/P331S on IgG1, S228P/F234A/L235A/G237A/P238S on IgG4, and S228P/F234A/L235A/G236-deleted/G237A/P238S on IgG4. Hybrid IgG2/4 Fc domains may also be used, such as Fc with residues 117-260 from IgG2 and residues 261-447 from IgG4.

[0494] Exemplary substitution that may be used to reduce CDC is a K322A mutation.

[0495] Fc positions that may be substituted to enhance binding of the isolated molecule or the isolated multispecific antibody of the disclosure to the activating FcγR and/or enhance Fc effector functions include positions 236, 239, 243, 256, 290, 292, 298, 300, 305, 312, 326, 330, 332, 333, 334, 345, 360, 339, 378, 396 or 430 (residue numbering according to the EU index). Exemplary mutations that may be made singularly or in combination are G236A, S239D, F243L, T256A, K290A, R292P, S298A, Y300L, V305L, K326A, A330K, 1332E, E333A, K334A, A339T and P396L. Exemplary combination substitutions that may be made to enhance ADCC or ADCP are S239D/I332E, S298A/E333A/K334A, F243L/R292P/Y300L, F243L/R292P/Y300L/P396L, F243L/R292P/Y300L/V3051/P396L or G236A/S239D/I332E. Fc positions that may be substituted to enhance CDC include positions 267, 268, 324, 326, 333, 345 and 430. Exemplary substitutions that may be made singularly or in combination are S267E, F1268F, S324T, K326A, K326W, E333A, E345K, E345Q, E345R, E345Y, E430S, E430F and E430T. Exemplary combination substitutions that may be made to enhance CDC are K326A/E333A, K326W/E333A, H268F/S324T, S267E/H268F, S267E/S324T and S267E/H268F/S324T.

[0496] In some embodiments, the FcγR is FcγRI, FcγRIIA, FcγRIIB or FcγRIII, or any combination thereof.

[0497] Fc positions that may be substituted to modulate half-life (e.g., binding to FcRn) include positions 250, 252, 253, 254, 256, 257, 307, 376, 380, 428, 434 and 435. Exemplary substitutions that may be made singularly or in combination are mutations T250Q, M252Y, I253A, S254T, T256E, P2571, T307A, D376V, E380A, M428L, H433K, N434S, N434A, N434H, N434F, H435A and H435R. Exemplary singular or combination substitutions that may be made to increase the half-life are substitutions M428L/N434S, M252Y/S254T/T256E, T250Q/M428L, N434A and T307A/E380A/N434A. M252Y/S254T/T256E is particularly useful. Exemplary singular or combination substitutions that may be made to reduce the half-life are mutations H435A, P2571/N434H, D376V/N434H, M252Y/S254T/T256E/H433K/N434F, T308P/N434A and H435R.

[0498] The specific substitutions described herein are substitutions when compared to the wild-type IgG1, wild-type IgG2 and wild-type IgG4 amino acid sequences of SEQ ID NOs: 2315, 2316 and 2317, respectively.

[0499] Exemplary substitutions that may be used in molecules that comprise two Fc regions are: L235A_L235A_D265S_T350V_L351Y_F405A_Y407V in the first Fc region and L235A_L235A_D265S_T350V_T366L_K392L_T394W in the second Fc region; or L235A_L235A_D265S_T350V_T366L_K392L_T394W in the first Fc region and L235A_L235A_D265S_T350V_L351Y_F405A_Y407V in the second Fc region.

(wild-type IgG1)
SEQ ID NO: 2315
ASTKGPSVFPLAPSSKSTSGGTAALGCLVKDYFPEPVTVSWNSGALTS
GVHTFPAVLQSSGLYSLSSVVTVPSSSLGTQTYICNVNHKPSNTKVDK
KVEPKSCDKTHTCPPCPAPELLGGPSVFLEPPKPKDTLMISRTPEVTC
VVVDVSHEDPEVKFNWYVDGVEVHNAKTKPREEQYNSTYRVVSVLTVL
HQDWLNGKEYKCKVSNKALPAPIEKTISKAKGQPREPQVYTLPPSRDE
LTKNQVSLTCLVKGFYPSDIAVEWESNGQPENNYKTTPPVLDSDGSFF
LYSKLTVDKSRWQQGNVFSCSVMHEALHNHYTQKSLSLSPGK
(wild-type IgG2)
SEQ ID NO: 2316
ASTKGPSVFPLAPCSRSTSESTAALGCLVKDYFPEPVTVSWNSGALTS
GVHTFPAVLQSSGLYSLSSVVTVPSSNFGTQTYTCNVDHKPSNTKVDK
TVERKCCVECPPCPAPPVAGPSVFLFPPKPKDTLMISRTPEVTCVVVD
VSHEDPEVQFNWYVDGVEVHNAKTKPREEQFNSTERVVSVLTVVHQDW
LNGKEYKCKVSNKGLPAPIEKTISKTKGQPREPQVYTLPPSREEMTKN
QVSLTCLVKGFYPSDISVEWESNGQPENNYKTTPPMLDSDGSFFLYSK
LTVDKSRWQQGNVFSCSVMHEALHNHYTQKSLSLSPGK
(wild-type IgG4)
SEQ ID NO: 2317
ASTKGPSVFPLAPCSRSTSESTAALGCLVKDYFPEPVTVSWNSGALTS
GVHTFPAVLQSSGLYSLSSVVTVPSSSLGTKTYTCNVDHKPSNTKVDK
RVESKYGPPCPSCPAPEFLGGPSVFLEPPKPKDTLMISRTPEVTCVVV
DVSQEDPEVQFNWYVDGVEVHNAKTKPREEQFNSTYRVVSVLTVLHQD
WLNGKEYKCKVSNKGLPSSIEKTISKAKGQPREPQVYTLPPSQEEMTK
NQVSLTCLVKGFYPSDIAVEWESNGQPENNYKTTPPVLDSDGSFFLYS
RLTVDKSRWQEGNVFSCSVMHEALHNHYTQKSLSLSLGK

[0500] Binding of the molecule or the multispecific antibody of the disclosure to FcγR or FcRn may be assessed on cells engineered to express each receptor using flow cytometry. In an exemplary binding assay, 2×10⁵ cells per well are seeded in 96-well plate and blocked in BSA Stain Buffer (BD Biosciences, San Jose, USA) for 30 min at 4° C. Cells are incubated with a test molecule on ice for 1.5 hour at 4° C. After being washed twice with BSA stain buffer, the cells are incubated with R-PE labeled anti-human IgG secondary antibody (Jackson Immunoresearch Laboratories) for 45 min at 4° C. The cells are washed twice in stain buffer and then resuspended in 150 μL of Stain Buffer containing 1:200 diluted DRAQ7 live/dead stain (Cell Signaling Technology, Danvers, USA). PE and DRAQ7 signals of the stained cells are detected by Miltenyi MACSQuant flow cytometer (Miltenyi Biotec, Auburn, USA) using B2 and B4 channel respectively. Live cells are gated on DRAQ7 exclusion and the geometric mean fluorescence signals are determined for at least 10,000 live events collected. FlowJo software (Tree Star) is used for analysis. Data is plotted as the logarithm of antibody concentration versus mean fluorescence signals. Nonlinear regression analysis is performed.

[0501] “Antibody-dependent cellular cytotoxicity”, “antibody-dependent cell-mediated cytotoxicity” or (ADCC) is a mechanism for inducing cell death that depends upon the interaction of antibody-coated target cells with effector cells possessing lytic activity, such as natural killer cells (NK), monocytes, macrophages and neutrophils via Fc gamma receptors (FcγR) expressed on effector cells. For example, NK cells express FcγRIIIa, whereas monocytes express FcγRI, FcγRII and FcγRIIIa. ADCC activity of the antibodies may be assessed using an in vitro assay using cells expressing the antigen the molecule or the multispecific antibody of the disclosure specifically binds to and NK cells as effector cells. Cytolysis may be detected by the release of label (e.g., radioactive substrates, fluorescent dyes or natural intracellular proteins) from the lysed cells. In an exemplary assay, target cells are used with a ratio of 1 target cell to 4 effector cells. Target cells are pre-labeled with BATDA and combined with effector cells and the test antibody. The samples are incubated for 2 hours and cell lysis measured by measuring released BATDA into the supernatant. Data is normalized to maximal cytotoxicity with 0.67% Triton X-100 (Sigma Aldrich) and minimal control determined by spontaneous release of BATDA from target cells in the absence of any antibody.

[0502] “Antibody-dependent cellular phagocytosis” (ADCP) refers to a mechanism of elimination of antibody-coated target cells by internalization by phagocytic cells, such as macrophages or dendritic cells. ADCP may be evaluated by using monocyte-derived macrophages as effector cells and cells expressing the antigen the molecule or the multispecific antibody of the disclosure specifically binds to as target cells also engineered to express GFP or another labeled molecule. In an exemplary assay, effector:target cell ratio may be for example 4:1. Effector cells may be incubated with target cells for 4 hours with or without the antibody of the invention. After incubation, cells may be detached using accutase. Macrophages may be identified with anti-CD11b and anti-CD14 antibodies coupled to a fluorescent label, and percent phagocytosis may be determined based on % GFP fluorescence in the CD11⁺CD14⁺ macrophages using standard methods.

[0503] “Complement-dependent cytotoxicity”, (CDC), refers to a mechanism for inducing cell death in which the Fc effector domain of a target-bound antibody binds and activates complement component C1q which in turn activates the complement cascade leading to target cell death. Activation of complement may also result in deposition of complement components on the target cell surface that facilitate CDC by binding complement receptors (e.g., CR3) on leukocytes. CDC of cells may be measured for example by plating cells expressing the antigen the molecule or the multispecific antibody of the disclosure specifically binds to at 1×10⁵ cells/well (50 μL/well) in RPMI-B (RPMI supplemented with 1% BSA), adding 50 μL of test molecule to the wells at final concentration between 0-100 μg/mL, incubating the reaction for 15 min at room temperature, adding 11 μL of pooled human serum to the wells, and incubation the reaction for 45 min at 37° C. Percentage (%) lysed cells may be detected as % propidium iodide stained cells in FACS assay using standard methods.

[0504] The Fc engineered molecules or the multispecific antibodies of the disclosure may be assessed for their functionality using several known assays and those described herein. Soluble forms of the receptors, such as the FcγRI, FcγRII, FcγRIII or FcRn receptors may be used, or alternatively cell-based assays may be used.

[0505] Protein A binding may be modulated using substitutions 435R and/or 436F as described in U.S. Pat. No. 9,982,013 or Q311R, Q311K, T307P/L309Q, T307P/V309Q, T307P/L309Q/Q311R or T307P/V309Q/Q311R as described in Int. Pat. Publ. No. WO2018/224951. Typically substations modulating protein A binding are engineered in asymmetric fashion to facilitate purification of the desired end product from intermediate or parental products.

### Half-Life Extension

[0506] Various additional approaches in addition to incorporating Fc region and introducing FcRn modulating substitutions into the Fc may be taken to modulate half-life of the molecules of the disclosures. The molecules of the disclosure may be pegylated, conjugated to albumin, albumin binding proteins transferring and fragments or analogues thereof, or XTEN polypeptide sequences (Int Pat. Publ. No. WO2010/091122) using known methods.

[0507] Additional half-life extending moieties that may be conjugated to molecules of the disclosure include polyethylene glycol (PEG) molecules, such as PEG5000 or PEG20,000, fatty acids and fatty acid esters of different chain lengths, for example laurate, myristate, stearate, arachidate, behenate, oleate, arachidonate, octanedioic acid, tetradecanedioic acid, octadecanedioic acid, docosanedioic acid, and the like, polylysine, octane, carbohydrates (dextran, cellulose, oligo- or polysaccharides) for desired properties. These moieties may be direct fusions with the molecules of the disclosure and may be generated by standard cloning and expression techniques. Alternatively, well known chemical coupling methods may be used to attach the moieties to recombinantly produced antigen binding domains that bind hK2 of the disclosure.

[0508] A pegyl moiety may for example be conjugated to the antigen binding domain by incorporating a cysteine residue to the C-terminus of the antigen binding domain, or engineering cysteines into residue positions that face away from the antigen binding site and attaching a pegyl group to the cysteine using well known methods.

### Glycoengineering

[0509] The isolated molecules or the isolated multispecific antibodies of the disclosure may be glycoengineered for the purpose of for example to facilitate manufacturing or to provide additional functionality. This can be accomplished for example by deleting or introducing N-glycosylation and/or O-glycosylation sites. Fc region containing molecules or the isolated multispecific antibodies may be converted to aglycosyl variants by N297A or N297Q substitution. Aglycosyl Fc variants may provide improved manufacturability in terms of more homogenous batches and also demonstrated reduced FcγR binding and hence reduced Fc-mediated effector functions.

[0510] Further, the isolated molecules or the isolated multispecific antibodies of the disclosure may also be expressed utilizing conditions that result in molecules having reduced amount of fucosyl residues or increased bisecting GlcNac structures. Such altered glycosylation patterns have been demonstrated to potentiate ADCC. These carbohydrate modifications may be accomplished by, for example, expressing the isolated molecules or the isolated multispecific antibodies of the disclosure in a cell with altered glycosylation machinery. Cells with altered glycosylation machinery have been described in the art and can be used as host cells in which to express the molecules of the disclosure to thereby produce molecules with altered glycosylation. For example, EP 1,176,195 describes a cell line with a functionally disrupted FUT8 gene, which encodes a fucosyl transferase, such that molecules expressed in such a cell line exhibit hypofucosylation. PCT Publication WO 03/03583 describes a variant CHO cell line, Lec13 cells, with reduced ability to attach fucose to Asn(297)-linked carbohydrates, also resulting in hypofucosylation of molecules expressed in that host cell (see also Shields et ai, 2002, J. Biol. Chem. 277:26733-26740). PCT Publication WO 99/54342 by Umana et al. describes cell lines engineered to express glycoprotein modifying glycosyl transferases (e.g., beta(1,4)-N acetylglucosaminyltransferase III (GnTIII)) such that molecules expressed in the engineered cell lines exhibit increased bisecting GlcNac structures which results in increased ADCC activity of the molecules (see also Umana et ai, Nat. Biotech. 17:176-180, 1999). Additionally, relatively high defucosylated molecules bearing the biantennary complex-type of Fc oligosaccharides may be generated by controlling culture osmolality (Konno et al., Cytotechnology 64(:249-65, 2012), application of a variant CHO line EB66 as the host cell line (Olivier et al., MAbs; 2(4): 405-415, 2010; PMID:20562582), application of a rat hybridoma cell line YB2/0 as the host cell line (Shinkawa et al., J Biol Chem 278:3466-3473, 2003), introduction of small interfering RNA specifically against the a 1,6-fucosyltrasferase (FUT8) gene (Mori et al., Biotechnol Bioeng 88:901-908, 2004), or co-expression of β-1,4-N-acetylglucosaminyltransferase III and Golgi α-mannosidase II or a potent alpha-mannosidase I inhibitor, kifunensine (Ferrara et al., J Biol Chem 281:5032-5036, 2006, Ferrara et al., Biotechnol Bioeng 93:851-861, 2006; Xhou et al., Biotechnol Bioeng 99:652-65, 2008).

### Co-Engagement of the TCR Complex and CD8

[0511] The isolated molecules or the multispecific antibodies of the disclosure are generated in a manner that results in CD8⁺ CTL activation only upon co-engagement of the TCR complex and CD8. Co-engagement and subsequent CD8⁺ CTL cell activation is controlled by choosing sufficiently low affinity CD8 and TCR complex antigen binding domains to be incorporated into the molecules or the multispecific antibodies. Using the low affinity binding domains, activation of CD8⁺ CTLs does not occur in molecules in which only either the low affinity CD8 binding domain or the low affinity TCR complex binding domain is present. The concept was successfully demonstrated herein as shown in Example 2. Molecules incorporating a low affinity CD3 binding domain without CD8 binding domains were unable to mediate tumor cell death or T cell activation, however incorporation of a CD8 binding domain into these molecules resulted in robust tumor cell death and T cell activation. On the contrary, molecules incorporating high affinity CD3 binding domains were able to mediate tumor cell killing in the absence of CD8 biding domains in the molecules.

[0512] The affinities of the antigen binding domains that specifically bind CD8 and the antigen binding domains that specifically bind the TCR complex that can be incorporated into the molecules or the multispecific antibodies of the disclosure may be in the range of about 50 nM or higher for an antigen binding domain that binds the TCR complex and about 0.5 nM or higher for an antigen binding domain that binds CD8. However, higher affinity antigen binding domains may also be used as long as they do not alone activate T cells.

[0513] Affinity of the antigen binding domains that bind CD8 or TCR complex or molecules comprising the antigen binding domains that specifically bind CD8 or TCR complex may be measured using known methods. The binding may be measured using Biacore 8K SPR. In an exemplary method, Biacore 8K SPR assay format is to capture the test molecule (e.g., the antigen binding domain or the molecule comprising the antigen binding domain) using a high density anti-human Fc surface, then inject antigen concentration titration using a single cycle kinetics method. Goat anti-human Fc IgG (Jackson Immunoresearch, Cat #109-005-098) is directly immobilized via amine coupling at 30 μg/mL in 10 mM acetate buffer, pH 4.5 on flow cells 1 and 2, on CMS Sensor Chip (GE) with a flow rate of 30 μL/min in HBSP (GE) buffer. The test molecules are captured on the anti-human Fc IgG surface at 0.5 μg/ml (˜200-300 RU) on flow cell 2. The running buffer is then changed to HBSP+100 ug/ml BSA. Antigen at 30 nM concentration in 3-fold dilution series is injected from low to high concentration using single cycle kinetics method. The off-rate is monitored 30 minutes after the last or highest concentration injection and then the surface is regenerated using 0.8% phosphoric acid (Bio-Rad). A buffer blank run, capturing the same test molecule and using the same conditions of sample run is also completed. The raw data is processed by subtracting two sets of reference data from the response data: 1) reference flow cell 1 subtracted from sample flow cell 2 and 2) buffer blank run from experimental run. The processed data at all concentrations for each test molecule is globally fit to a 1:1 simple Langmuir binding model to extract estimates of the kinetic (kon, koff) and affinity (KD) constants.

[0514] The affinity of the third antigen binding domain that specifically binds an antigen expressed by an undesired cell may be determined using methods described herein. The affinity of the third antigen binding domain may range substantially and typically may be about 1×10⁻⁸ or less.

[0515] The effect of the molecule or the multispecific antibody on T cell activation may be assessed for example evaluating T cell proliferation in an assay in which human Pan T cell are isolated from healthy human donor PBMCs using for example EasySep™ Human T Cell Enrichment Kit, culturing the isolated T cells in a 1:1 Effector:Target ratio (10,000 T cells:10,000 target cells) at varying test molecule concentrations starting from 500 ng/ml, with 3-fold serial dilution. Suitable target cells are for example H929 cells. T cells ware labeled with CellTrace™ Violet (CTV) Cell Proliferation dye Kit (ThermoFisher) prior to co-culture. After 72 hrs, samples are harvested, labeled with anti-CD3 and anti-CD8 antibody and analyzed for CTV dye dilution. Cells are gated for FSC/SSC, live cells and CD3+CD8+ or CD3+CD8-cells. Alternatively, CD25 may be used as surrogate for T cell activation.

Conjugates with Cytotoxic Agents, Drugs, Detectable Labels, and the Like

[0516] The isolated molecules or the multispecific molecules of the disclosure may be conjugated to a cytotoxic agent, therapeutic agent, detectable labels and the like. These molecules are referred herein to immunoconjugates. The immunoconjugates comprising the isolated molecules or the multispecific molecules of the disclosure may be used to detect, deliver payload or kill cells the undesired cells the molecules or the multispecific molecules of the disclosure bind to. Alternatively, the immunoconjugates comprising the isolated molecules or the multispecific molecules of the disclosure may be used to detect, deliver payload or kill the CD8⁺ CTLs in instances when the molecules or the multispecific molecules of the disclosure do not comprise the thirds antigen binding domain that binds an antigen expressed by an undesired cell, e.g., bispecific CD3×CD8 molecules.

[0517] In some embodiments, the immunoconjugate comprises a detectable label.

[0518] In some embodiments, the immunoconjugate comprises a cytotoxic agent.

[0519] In some embodiments, the immunoconjugate comprises a therapeutic.

[0520] A detectable label includes compositions that can be visualized via spectroscopic, photochemical, biochemical, immunochemical, or chemical means. Detectable labels may also include cytotoxic agents, cytotoxic agents may include detectable labels.

[0521] Exemplary detectable labels include radioactive isotopes, magnetic beads, metallic beads, colloidal particles, fluorescent dyes, electron-dense reagents, enzymes (for example, as commonly used in an ELISA), biotin, digoxigenin, haptens, luminescent molecules, chemiluminescent molecules, fluorochromes, fluorophores, fluorescent quenching agents, colored molecules, radioactive isotopes, scintillates, avidin, streptavidin, protein A, protein G, antibodies or fragments thereof, polyhistidine, Ni²⁺, Flag tags, myc tags, heavy metals, enzymes, alkaline phosphatase, peroxidase, luciferase, electron donors/acceptors, acridinium esters, and colorimetric substrates.

[0522] A detectable label may emit a signal spontaneously, such as when the detectable label is a radioactive isotope. In other cases, the detectable label emits a signal as a result of being stimulated by an external field.

[0523] Exemplary radioactive isotopes may be γ-emitting, Auger-emitting, β-emitting, an alpha-emitting or positron-emitting radioactive isotope. Exemplary radioactive isotopes include ³H, ¹¹C, ¹³C, ¹⁵N, ¹⁸F, ¹⁹F, ⁵⁵Co, ⁵⁷Co, ⁶⁰Co, ⁶¹Cu, ⁶²Cu, ⁶⁴Cu, ⁶⁷Cu, ⁶⁸Ga, ⁷²As, ⁷⁵Br, ⁸⁶Y, ⁸⁹Zr, ⁹⁰Sr, ⁹⁴mTc, ⁹⁹mTc, ¹¹⁵In, ¹²³I, ¹²⁴I, ¹²⁵I, ¹³¹I, ²¹¹At, ²¹²Bi, ²¹³Bi, ²²³Ra, ²²⁶Ra, ²²⁵Ac and ²²⁷Ac.

[0524] Exemplary metal atoms are metals with an atomic number greater than 20, such as calcium atoms, scandium atoms, titanium atoms, vanadium atoms, chromium atoms, manganese atoms, iron atoms, cobalt atoms, nickel atoms, copper atoms, zinc atoms, gallium atoms, germanium atoms, arsenic atoms, selenium atoms, bromine atoms, krypton atoms, rubidium atoms, strontium atoms, yttrium atoms, zirconium atoms, niobium atoms, molybdenum atoms, technetium atoms, ruthenium atoms, rhodium atoms, palladium atoms, silver atoms, cadmium atoms, indium atoms, tin atoms, antimony atoms, tellurium atoms, iodine atoms, xenon atoms, cesium atoms, barium atoms, lanthanum atoms, hafnium atoms, tantalum atoms, tungsten atoms, rhenium atoms, osmium atoms, iridium atoms, platinum atoms, gold atoms, mercury atoms, thallium atoms, lead atoms, bismuth atoms, francium atoms, radium atoms, actinium atoms, cerium atoms, praseodymium atoms, neodymium atoms, promethium atoms, samarium atoms, europium atoms, gadolinium atoms, terbium atoms, dysprosium atoms, holmium atoms, erbium atoms, thulium atoms, ytterbium atoms, lutetium atoms, thorium atoms, protactinium atoms, uranium atoms, neptunium atoms, plutonium atoms, americium atoms, curium atoms, berkelium atoms, californium atoms, einsteinium atoms, fermium atoms, mendelevium atoms, nobelium atoms, or lawrencium atoms.

[0525] In some embodiments, the metal atoms may be alkaline earth metals with an atomic number greater than twenty. In some embodiments, the metal atoms may be lanthanides. In some embodiments, the metal atoms may be actinides. In some embodiments, the metal atoms may be transition metals. In some embodiments, the metal atoms may be poor metals. In some embodiments, the metal atoms may be gold atoms, bismuth atoms, tantalum atoms, and gadolinium atoms. In some embodiments, the metal atoms may be metals with an atomic number of 53 (i.e., iodine) to 83 (i.e., bismuth).

[0526] In some embodiments, the metal atoms may be atoms suitable for magnetic resonance imaging.

[0527] The metal atoms may be metal ions in the form of +1, +2, or +3 oxidation states, such as Ba²⁺, Bi³⁺, Cs⁺, Ca²⁺, Cr²⁺, Cr³⁺, Cr⁶⁺, Co²⁺, Co³⁺, Cu⁺, Cu²⁺, Cu³⁺, Ga³⁺, Gd³⁺, Au⁺, Au³⁺, Fe²⁺, Fe³⁺, F³⁺, Pb²⁺, Mn²⁺, Mn³⁺, Mn⁴⁺, Mn⁷⁺, Hg²⁺, Ni²⁺, Ni³⁺, Ag⁺, Sr²⁺, Sn²⁺, Sn⁴⁺, and Zn²⁺. The metal atoms may comprise a metal oxide, such as iron oxide, manganese oxide, or gadolinium oxide.

[0528] Suitable dyes include any commercially available dyes such as, for example, 5(6)-carboxyfluorescein, IRDye 680RD maleimide or IRDye 800CW, ruthenium polypyridyl dyes, and the like.

[0529] Suitable fluorophores are fluorescein isothiocyanate (FITC), fluorescein thiosemicarbazide, rhodamine, Texas Red, CyDyes (e.g., Cy3, Cy5, Cy5.5), Alexa Fluors (e.g., Alexa488, Alexa555, Alexa594; Alexa647), near infrared (NIR) (700-900 nm) fluorescent dyes, and carbocyanine and aminostyryl dyes.

[0530] The immunoconjugates comprising a detectable label may be used as an imaging agent.

[0531] In some embodiments, the cytotoxic agent is a chemotherapeutic agent, a drug, a growth inhibitory agent, a toxin (e.g., an enzymatically active toxin of bacterial, fungal, plant, or animal origin, or fragments thereof), or a radioactive isotope (i.e., a radioconjugate).

[0532] In some embodiments, the cytotoxic agent is daunomycin, doxorubicin, methotrexate, vindesine, bacterial toxins such as diphtheria toxin, ricin, geldanamycin, maytansinoids or calicheamicin. The cytotoxic agent may elicit their cytotoxic and cytostatic effects by mechanisms including tubulin binding, DNA binding, or topoisomerase inhibition.

[0533] In some embodiments, the cytotoxic agent is an enzymatically active toxin such as diphtheria A chain, nonbinding active fragments of diphtheria toxin, exotoxin A chain (from Pseudomonas aeruginosa), ricin A chain, abrin A chain, modeccin A chain, alpha-sarcin, Aleurites fordii proteins, dianthin proteins, Phytolaca americana proteins (PAPI, PAPII, and PAP-S), Momordica charantia inhibitor, curcin, crotin, Sapaonaria officinalis inhibitor, gelonin, mitogellin, restrictocin, phenomycin, enomycin, and the tricothecenes.

[0534] In some embodiments, the cytotoxic agent is a radionuclide, such as ²¹²Bi, ¹³¹I, ¹³¹In, ⁹⁰Y, and ¹⁸⁶Re.

[0535] In some embodiments, the cytotoxic agent is dolastatins or dolostatin peptidic analogs and derivatives, auristatin or monomethyl auristatin phenylalanine. Exemplary molecules are disclosed in U.S. Pat. Nos. 5,635,483 and 5,780,588. Dolastatins and auristatins have been shown to interfere with microtubule dynamics, GTP hydrolysis, and nuclear and cellular division (Woyke et al (2001) Antimicrob Agents and Chemother. 45(12):3580-3584) and have anticancer and antifungal activity. The dolastatin or auristatin drug moiety may be attached to the antibody of the invention through the N (amino) terminus or the C (carboxyl) terminus of the peptidic drug moiety (WO02/088172), or via any cysteine engineered into the antibody.

[0536] The immunoconjugates may be made using known methods.

[0537] In some embodiments, the detectable label is complexed with a chelating agent.

[0538] The detectable label, cytotoxic agent or therapeutic may be linked directly, or indirectly via a linker, to the polypeptides, the heterologous polypeptides or the proteinaceous molecules that bind the polypeptides or the heterologous polypeptides. Suitable linkers are known in the art and include, for example, prosthetic groups, non-phenolic linkers (derivatives of N-succimidyl-benzoates; dodecaborate), chelating moieties of both macrocyclics and acyclic chelators, such as derivatives of 1,4,7,10-tetraazacyclododecane-1,4,7,10,tetraacetic acid (DOTA), derivatives of diethylenetriaminepentaacetic avid (DTPA), derivatives of S-2-(4-Isothiocyanatobenzyl)-1,4,7-triazacyclononane-1,4,7-triacetic acid (NOTA) and derivatives of 1,4,8,11-tetraazacyclodocedan-1,4,8,11-tetraacetic acid (TETA), N-succinimidyl-3-(2-pyridyldithiol) propionate (SPDP), iminothiolane (IT), bifunctional derivatives of imidoesters (such as dimethyl adipimidate HCl), active esters (such as disuccinimidyl suberate), aldehydes (such as glutaraldehyde), bis-azido compounds (such as bis(p-azidobenzoyl)hexanediamine), bis-diazonium derivatives (such as bis-(p-diazoniumbenzoyl)-ethylenediamine), diisocyanates (such as toluene 2,6-diisocyanate), and bis-active fluorine compounds (such as 1,5-difluoro-2,4-dinitrobenzene) and other chelating moieties. Suitable peptide linkers are well known.

### Kits

[0539] The disclosure also provides a kit comprising one or more isolated molecules or isolated multispecific antibodies of the disclosure. The kit may be used for therapeutic uses or as diagnostic kits.

[0540] In some embodiments, the kit comprises the isolated molecule or the isolated multispecific antibody of the disclosure and reagents for detecting the isolated molecule or the isolated multispecific antibody. The kit can include one or more other elements including: instructions for use; other reagents, e.g., a label, a therapeutic agent, or an agent useful for chelating, or otherwise coupling, an antibody to a label or therapeutic agent, or a radioprotective composition; devices or other materials for preparing the isolated molecule or the isolated multispecific antibody for administration; pharmaceutically acceptable carriers; and devices or other materials for administration to a subject.

### Pharmaceutical Compositions

[0541] The disclosure also provides a pharmaceutical composition comprising the isolated molecule or the isolated multispecific antibody of the disclosure and a pharmaceutically acceptable carrier. For therapeutic use, the isolated molecule or the isolated multispecific antibody of the disclosure may be prepared as pharmaceutical compositions containing an effective amount of the isolated molecule or the isolated multispecific antibody of the disclosure as an active ingredient in a pharmaceutically acceptable carrier. “Carrier” refers to a diluent, adjuvant, excipient, or vehicle with which the antibody of the invention is administered. Such vehicles may be liquids, such as water and oils, including those of petroleum, animal, vegetable or synthetic origin, such as peanut oil, soybean oil, mineral oil, sesame oil and the like. For example, 0.4% saline and 0.3% glycine may be used. These solutions are sterile and generally free of particulate matter. They may be sterilized by conventional, well-known sterilization techniques (e.g., filtration). The compositions may contain pharmaceutically acceptable auxiliary substances as required to approximate physiological conditions such as pH adjusting and buffering agents, stabilizing, thickening, lubricating and coloring agents, etc. The concentration of the antibodies of the invention in such pharmaceutical formulation may vary, from less than about 0.5%, usually to at least about 1% to as much as 15 or 20% by weight and may be selected primarily based on required dose, fluid volumes, viscosities, etc., according to the mode of administration selected. Suitable vehicles and formulations, inclusive of other human proteins, e.g., human serum albumin, are described, for example, in e.g., Remington: The Science and Practice of Pharmacy, 21st Edition, Troy, D. B. ed., Lipincott Williams and Wilkins, Philadelphia, Pa. 2006, Part 5, Pharmaceutical Manufacturing pp 691-1092, See especially pp. 958-989.

### Methods and Uses

[0542] The isolated molecules and the multispecific antibodies of the disclosure have broad applicability in therapeutic or research setting, as therapeutics, diagnostics, research tools, imaging agents and capture agents. The isolated molecules and the multispecific antibodies of the disclosure provide an improvement to the state of art by providing selective activation or recruitment of CD8⁺ CTLs and are thereby expected to provide more safe and effective treatment with a broader therapeutic index. The isolated molecules and the multispecific antibodies of the disclosure can be used to treat any diseases in which depletion or reduction in a number of undesired cells is desired. The isolated molecules and the multispecific antibodies of the disclosure may have a potential to treat patients without large naïve repertoire, such as elderly patients or any patients whose immune system is compromised.

[0543] The disclosure provides a method of targeting CD8⁺ CTLs to an undesired cell in a subject, comprising administering to the subject an isolated molecule comprising a first antigen binding domain, a second antigen binding domain and a third antigen binding domain, wherein the first antigen binding domain specifically binds CD8, the second antigen binding domain specifically binds a TCR complex and the third antigen binding domain specifically binds an antigen expressed by an undesired cell, wherein the isolated molecule selectively activates or recruits CD8⁺ CTLs upon co-engagement of the TCR complex and CD8 and is unable to activate or recruit CD8⁺ CTLs in the absence of co-engagement of the TCR complex and CD8.

[0544] The disclosure also provides a method of targeting CD8⁺ CTLs to an undesired cell in a subject, comprising administering to the subject an isolated molecule comprising a first polypeptide, a second polypeptide and a third polypeptide, wherein the first polypeptide comprises, from N- to C-terminus, a second antigen binding domain comprising a scFv that specifically binds a TCR complex, a VH that is capable of specifically binding CD8, a CH1 domain, a hinge, a CH2 domain and a CH3 domain; the second polypeptide comprises, from N- to C-terminus, a VL that is capable of specifically binding CD8 and a CL domain; and the third polypeptide comprises, from N- to C-terminus, a third antigen binding domain comprising a scFv that specifically binds an antigen expressed by an undesired cell and a Fc or a fragment of the Fc, wherein the isolated molecule selectively activates or recruits CD8⁺ CTLs upon co-engagement of the TCR complex and CD8 and is unable to activate or recruit CD8⁺ CTLs in the absence of co-engagement of the TCR complex and CD8.

[0545] The disclosure also provides a method of targeting CD8⁺ CTLs to an undesired cell in a subject, comprising administering to the subject an isolated molecule comprising a first polypeptide, a second polypeptide and a third polypeptide, wherein the first polypeptide comprises, from N- to C-terminus, a VH that is capable of specifically binding CD8, a CH1 domain, a hinge, a CH2 domain and a CH3 domain; the second polypeptide comprises, from N- to C-terminus, a VL that is capable of specifically binding CD8, a CL domain and a second antigen binding domain comprising a scFv that specifically binds a TCR complex; and the third polypeptide comprises, from N- to C-terminus, a third antigen binding domain comprising a scFv that specifically binds an antigen expressed by an undesired cell and a Fc or a fragment of the Fc, wherein the isolated molecule selectively activates or recruits CD8⁺ CTLs upon co-engagement of the TCR complex and CD8 and is unable to activate or recruit CD8⁺ CTLs in the absence of co-engagement of the TCR complex and CD8.

[0546] The disclosure also provides a method of targeting CD8⁺ CTLs to an undesired cell in a subject, comprising administering to the subject an isolated molecule comprising a first polypeptide, a second polypeptide and a third polypeptide, wherein the first polypeptide comprises, from N- to C-terminus, a VH that is capable of specifically CD8, a CH1 domain, a hinge, a CH2 domain, a CH3 domain and a second antigen binding domain comprising a scFv that specifically binds a TCR complex; the second polypeptide comprises, from N- to C-terminus, a VL that is capable of specifically binding CD8 and a CL domain; and the third polypeptide comprises, from N- to C-terminus, a third antigen binding domain comprising a scFv that specifically binds an antigen expressed by an undesired cell and a Fc or a fragment of the Fc, wherein the isolated molecule selectively activates or recruits CD8⁺ CTLs upon co-engagement of the TCR complex and CD8 and is unable to activate or recruit CD8⁺ CTLs in the absence of co-engagement of the TCR complex and CD8.

[0547] The disclosure also provides a method of treating a cancer in a subject, comprising: administering to the subject an isolated molecule comprising a first antigen binding domain, a second antigen binding domain and a third antigen binding domain, wherein the first antigen binding domain specifically binds CD8, the second antigen binding domain specifically binds a TCR complex and the third antigen binding domain specifically binds an antigen expressed by an undesired cell, wherein the isolated molecule selectively activates or recruits CD8⁺ CTLs upon co-engagement of the TCR complex and CD8 and is unable to activate or recruit CD8⁺ CTLs in the absence of co-engagement of the TCR complex and CD8.

[0548] The disclosure also provides a method of treating a cancer in a subject, comprising administering to the subject an isolated molecule comprising a first polypeptide, a second polypeptide and a third polypeptide, wherein the first polypeptide comprises, from N- to C-terminus, a second antigen binding domain comprising a scFv that specifically binds a TCR complex, a VH that is capable of specifically binding CD8, a CH1 domain, a hinge, a CH2 domain and a CH3 domain; the second polypeptide comprises, from N- to C-terminus, a VL that is capable of specifically binding CD8 and a CL domain; and the third polypeptide comprises, from N- to C-terminus, a third antigen binding domain comprising a scFv that specifically binds an antigen expressed by an undesired cell and a Fc or a fragment of the Fc, wherein the isolated molecule selectively activates or recruits CD8⁺ CTLs upon co-engagement of the TCR complex and CD8 and is unable to activate or recruit CD8⁺ CTLs in the absence of co-engagement of the TCR complex and CD8.

[0549] The disclosure also provides a method of treating a cancer in a subject, comprising administering to the subject an isolated molecule comprising a first polypeptide, a second polypeptide and a third polypeptide, wherein the first polypeptide comprises, from N- to C-terminus, a VH that is capable of specifically binding CD8, a CH1 domain, a hinge, a CH2 domain and a CH3 domain; the second polypeptide comprises, from N- to C-terminus, a VL that is capable of specifically binding CD8, a CL domain and a second antigen binding domain comprising a scFv that specifically binds a TCR complex; and the third polypeptide comprises, from N- to C-terminus, a third antigen binding domain comprising a scFv that specifically binds an antigen expressed by an undesired cell and a Fc or a fragment of the Fc, wherein the isolated molecule selectively activates or recruits CD8⁺ CTLs upon co-engagement of the TCR complex and CD8 and is unable to activate or recruit CD8⁺ CTLs in the absence of co-engagement of the TCR complex and CD8.

[0550] The disclosure also provides a method of treating a cancer in a subject, comprising administering to the subject an isolated molecule comprising a first polypeptide, a second polypeptide and a third polypeptide, wherein the first polypeptide comprises, from N- to C-terminus, a VH that is capable of specifically CD8, a CH1 domain, a hinge, a CH2 domain, a CH3 domain and a second antigen binding domain comprising a scFv that specifically binds a TCR complex; the second polypeptide comprises, from N- to C-terminus, a VL that is capable of specifically binding CD8 and a CL domain; and the third polypeptide comprises, from N- to C-terminus, a third antigen binding domain comprising a scFv that specifically binds an antigen expressed by an undesired cell and a Fc or a fragment of the Fc, wherein the isolated molecule selectively activates or recruits CD8⁺ CTLs upon co-engagement of the TCR complex and CD8 and is unable to activate or recruit CD8⁺ CTLs in the absence of co-engagement of the TCR complex and CD8.

[0551] The disclosure also provides a method of enhancing a CD8⁺ CTL response against an undesired cell in a subject, comprising: administering to the subject an isolated molecule comprising a first antigen binding domain, a second antigen binding domain and a third antigen binding domain, wherein the first antigen binding domain specifically binds CD8, the second antigen binding domain specifically binds TCR complex and the third antigen binding domain specifically binds an antigen expressed by an undesired cell, wherein the isolated molecule selectively activates or recruits CD8⁺ CTLs upon co-engagement of the TCR complex and CD8 and is unable to activate or recruit CD8⁺ CTLs in the absence of co-engagement of the TCR complex and CD8.

[0552] The disclosure also provides a method of enhancing a CD8⁺ CTL response against an undesired cell in a subject, comprising administering to the subject an isolated molecule comprising a first polypeptide, a second polypeptide and a third polypeptide, wherein the first polypeptide comprises, from N- to C-terminus, a second antigen binding domain comprising a scFv that specifically binds a TCR complex, a VH that is capable of specifically binding CD8, a CH1 domain, a hinge, a CH2 domain and a CH3 domain; the second polypeptide comprises, from N- to C-terminus, a VL that is capable of specifically binding CD8 and a CL domain; and the third polypeptide comprises, from N- to C-terminus, a third antigen binding domain comprising a scFv that specifically binds an antigen expressed by an undesired cell and a Fc or a fragment of the Fc, wherein the isolated molecule selectively activates or recruits CD8⁺ CTLs upon co-engagement of the TCR complex and CD8 and is unable to activate or recruit CD8⁺ CTLs in the absence of co-engagement of the TCR complex and CD8.

[0553] The disclosure also provides a method of enhancing a CD8⁺ CTL response against an undesired cell in a subject, comprising administering to the subject an isolated molecule comprising a first polypeptide, a second polypeptide and a third polypeptide, wherein the first polypeptide comprises, from N- to C-terminus, a VH that is capable of specifically binding CD8, a CH1 domain, a hinge, a CH2 domain and a CH3 domain; the second polypeptide comprises, from N- to C-terminus, a VL that is capable of specifically binding CD8, a CL domain and a second antigen binding domain comprising a scFv that specifically binds a TCR complex; and the third polypeptide comprises, from N- to C-terminus, a third antigen binding domain comprising a scFv that specifically binds an antigen expressed by an undesired cell and a Fc or a fragment of the Fc, wherein the isolated molecule selectively activates or recruits CD8⁺ CTLs upon co-engagement of the TCR complex and CD8 and is unable to activate or recruit CD8⁺ CTLs in the absence of co-engagement of the TCR complex and CD8.

[0554] The disclosure also provides a method of enhancing a CD8⁺ CTL response against an undesired cell in a subject, comprising administering to the subject an isolated molecule comprising a first polypeptide, a second polypeptide and a third polypeptide, wherein the first polypeptide comprises, from N- to C-terminus, a VH that is capable of specifically CD8, a CH1 domain, a hinge, a CH2 domain, a CH3 domain and a second antigen binding domain comprising a scFv that specifically binds a TCR complex; the second polypeptide comprises, from N- to C-terminus, a VL that is capable of specifically binding CD8 and a CL domain; and the third polypeptide comprises, from N- to C-terminus, a third antigen binding domain comprising a scFv that specifically binds an antigen expressed by an undesired cell and a Fc or a fragment of the Fc, wherein the isolated molecule selectively activates or recruits CD8⁺ CTLs upon co-engagement of the TCR complex and CD8 and is unable to activate or recruit CD8⁺ CTLs in the absence of co-engagement of the TCR complex and CD8.

[0555] The disclosure also provides a method of enhancing a CD8⁺ CTL response against a cancer in a subject, comprising: administering to the subject an isolated molecule comprising a first antigen binding domain, a second antigen binding domain and a third antigen binding domain, wherein the first antigen binding domain specifically binds CD8, the second antigen binding domain specifically binds a TCR complex and the third antigen binding domain specifically binds an antigen expressed by an undesired cell, wherein the isolated molecule selectively activates or recruits CD8⁺ CTLs upon co-engagement of the TCR complex and CD8 and is unable to activate or recruit CD8⁺ CTLs in the absence of co-engagement of the TCR complex and CD8.

[0556] The disclosure also provides a method of enhancing a CD8⁺ CTL response against a cancer in a subject, comprising administering to the subject an isolated molecule comprising a first polypeptide, a second polypeptide and a third polypeptide, wherein the first polypeptide comprises, from N- to C-terminus, a second antigen binding domain comprising a scFv that specifically binds a TCR complex, a VH that is capable of specifically binding CD8, a CH1 domain, a hinge, a CH2 domain and a CH3 domain; the second polypeptide comprises, from N- to C-terminus, a VL that is capable of specifically binding CD8 and a CL domain; and the third polypeptide comprises, from N- to C-terminus, a third antigen binding domain comprising a scFv that specifically binds an antigen expressed by an undesired cell and a Fc or a fragment of the Fc, wherein the isolated molecule selectively activates or recruits CD8⁺ CTLs upon co-engagement of the TCR complex and CD8 and is unable to activate or recruit CD8⁺ CTLs in the absence of co-engagement of the TCR complex and CD8.

[0557] The disclosure also provides a method of enhancing a CD8⁺ CTL response against a cancer in a subject, comprising administering to the subject an isolated molecule comprising a first polypeptide, a second polypeptide and a third polypeptide, wherein the first polypeptide comprises, from N- to C-terminus, a VH that is capable of specifically binding CD8, a CH1 domain, a hinge, a CH2 domain and a CH3 domain; the second polypeptide comprises, from N- to C-terminus, a VL that is capable of specifically binding CD8, a CL domain and a second antigen binding domain comprising a scFv that specifically binds a TCR complex; and third polypeptide comprises, from N- to C-terminus, a third antigen binding domain comprising a scFv that specifically binds an antigen expressed by an undesired cell and a Fc or a fragment of the Fc, wherein the isolated molecule selectively activates or recruits CD8⁺ CTLs upon co-engagement of the TCR complex and CD8 and is unable to activate or recruit CD8⁺ CTLs in the absence of co-engagement of the TCR complex and CD8.

[0558] The disclosure also provides a method of enhancing a CD8⁺ CTL response against a cancer in a subject, comprising administering to the subject an isolated molecule comprising a first polypeptide, a second polypeptide and a third polypeptide, wherein the first polypeptide comprises, from N- to C-terminus, a VH that is capable of specifically CD8, a CH1 domain, a hinge, a CH2 domain, a CH3 domain and a second antigen binding domain comprising a scFv that specifically binds a TCR complex; the second polypeptide comprises, from N- to C-terminus, a VL that is capable of specifically binding CD8 and a CL domain; and the third polypeptide comprises, from N- to C-terminus, a third antigen binding domain comprising a scFv that specifically binds an antigen expressed by an undesired cell and a Fc or a fragment of the Fc, wherein the isolated molecule selectively activates or recruits CD8⁺ CTLs upon co-engagement of the TCR complex and CD8 and is unable to activate or recruit CD8⁺ CTLs in the absence of co-engagement of the TCR complex and CD8.

[0559] The disclosure also provides a method of providing an improved T cell redirection therapy to a subject in need thereof, comprising: administering to the subject an isolated molecule comprising a first antigen binding domain, a second antigen binding domain and a third antigen binding domain, wherein the first antigen binding domain specifically binds CD8, the second antigen binding domain specifically binds a TCR complex and the third antigen binding domain specifically binds an antigen expressed by an undesired cell, wherein the isolated molecule selectively activates or recruits CD8⁺ CTLs upon co-engagement of the TCR complex and CD8 and is unable to activate or recruit CD8⁺ CTLs in the absence of co-engagement of the TCR complex and CD8.

[0560] The disclosure also provides a method of providing an improved T cell redirection therapy to a subject in need thereof, comprising: administering to the subject an isolated molecule comprising a first polypeptide, a second polypeptide and a third polypeptide, wherein the first polypeptide comprises, from N- to C-terminus, a second antigen binding domain comprising a scFv that specifically binds a TCR complex, a VH that is capable of specifically binding CD8, a CH1 domain, a hinge, a CH2 domain and a CH3 domain; the second polypeptide comprises, from N- to C-terminus, a VL that is capable of specifically binding CD8 and a CL domain; and the third polypeptide comprises, from N- to C-terminus, a third antigen binding domain comprising a scFv that specifically binds an antigen expressed by an undesired cell and a Fc or a fragment of the Fc, wherein the isolated molecule selectively activates or recruits CD8⁺ CTLs upon co-engagement of the TCR complex and CD8 and is unable to activate or recruit CD8⁺ CTLs in the absence of co-engagement of the TCR complex and CD8.

[0561] The disclosure also provides a method of providing an improved T cell redirection therapy to a subject in need thereof, comprising: administering to the subject an isolated molecule comprising a first polypeptide, a second polypeptide and a third polypeptide, wherein the first polypeptide comprises, from N- to C-terminus, a VH that is capable of specifically binding CD8, a CH1 domain, a hinge, a CH2 domain and a CH3 domain; the second polypeptide comprises, from N- to C-terminus, a VL that is capable of specifically binding CD8, a CL domain and a second antigen binding domain comprising a scFv that specifically binds a TCR complex; and the third polypeptide comprises, from N- to C-terminus, a third antigen binding domain comprising a scFv that specifically binds an antigen expressed by an undesired cell and a Fc or a fragment of the Fc, wherein the isolated molecule selectively activates or recruits CD8⁺ CTLs upon co-engagement of the TCR complex and CD8 and is unable to activate or recruit CD8⁺ CTLs in the absence of co-engagement of the TCR complex and CD8.

[0562] The disclosure also provides a method of providing an improved T cell redirection therapy to a subject in need thereof, comprising: administering to the subject an isolated molecule comprising a first polypeptide, a second polypeptide and a third polypeptide, wherein the first polypeptide comprises, from N- to C-terminus, a VH that is capable of specifically CD8, a CH1 domain, a hinge, a CH2 domain, a CH3 domain and a second antigen binding domain comprising a scFv that specifically binds a TCR complex; the second polypeptide comprises, from N- to C-terminus, a VL that is capable of specifically binding CD8 and a CL domain; and the third polypeptide comprises, from N- to C-terminus, a third antigen binding domain comprising a scFv that specifically binds an antigen expressed by an undesired cell and a Fc or a fragment of the Fc, wherein the isolated molecule selectively activates or recruits CD8⁺ CTLs upon co-engagement of the TCR complex and CD8 and is unable to activate or recruit CD8⁺ CTLs in the absence of co-engagement of the TCR complex and CD8.

[0563] The disclosure also provides a method of selectively activating or recruiting CD8⁺ CTLs towards an undesired cell, comprising: contacting a population of lymphocytes with an isolated molecule, comprising: a first antigen binding domain, a second antigen binding domain and a third antigen binding domain, wherein the first antigen binding domain specifically binds CD8, the second antigen binding domain specifically binds a TCR complex and the third antigen binding domain specifically binds an antigen expressed by an undesired cell, wherein the isolated molecule selectively activates or recruits CD8⁺ CTLs upon co-engagement of the TCR complex and CD8 and is unable to activate or recruit CD8⁺ CTLs in the absence of co-engagement of the TCR complex and CD8.

[0564] The disclosure also provides a method of selectively activating or recruiting CD8⁺ CTLs towards an undesired cell, comprising: contacting a population of lymphocytes with an isolated molecule comprising a first polypeptide, a second polypeptide and a third polypeptide, wherein the first polypeptide comprises, from N- to C-terminus, a second antigen binding domain comprising a scFv that specifically binds a TCR complex, a VH that is capable of specifically binding CD8, a CH1 domain, a hinge, a CH2 domain and a CH3 domain; the second polypeptide comprises, from N- to C-terminus, a VL that is capable of specifically binding CD8 and a CL domain; and the third polypeptide comprises, from N- to C-terminus, a third antigen binding domain comprising a scFv that specifically binds an antigen expressed by an undesired cell and a Fc or a fragment of the Fc, wherein the isolated molecule selectively activates or recruits CD8⁺ CTLs upon co-engagement of the TCR complex and CD8 and is unable to activate or recruit CD8⁺ CTLs in the absence of co-engagement of the TCR complex and CD8.

[0565] The disclosure also provides a method of selectively activating or recruiting CD8⁺ CTLs towards an undesired cell, comprising: contacting a population of lymphocytes with an isolated molecule comprising a first polypeptide, a second polypeptide and a third polypeptide, wherein the first polypeptide comprises, from N- to C-terminus, a VH that is capable of specifically binding CD8, a CH1 domain, a hinge, a CH2 domain and a CH3 domain; the second polypeptide comprises, from N- to C-terminus, a VL that is capable of specifically binding CD8, a CL domain and a second antigen binding domain comprising a scFv that specifically binds a TCR complex; and the third polypeptide comprises, from N- to C-terminus, a third antigen binding domain comprising a scFv that specifically binds an antigen expressed by an undesired cell and a Fc or a fragment of the Fc, wherein the isolated molecule selectively activates or recruits CD8⁺ CTLs upon co-engagement of the TCR complex and CD8 and is unable to activate or recruit CD8⁺ CTLs in the absence of co-engagement of the TCR complex and CD8.

[0566] The disclosure also provides a method of selectively activating or recruiting CD8⁺ CTLs towards an undesired cell, comprising: contacting a population of lymphocytes with an isolated molecule comprising a first polypeptide, a second polypeptide and a third polypeptide, wherein the first polypeptide comprises, from N- to C-terminus, a VH that is capable of specifically CD8, a CH1 domain, a hinge, a CH2 domain, a CH3 domain and a second antigen binding domain comprising a scFv that specifically binds a TCR complex; the second polypeptide comprises, from N- to C-terminus, a VL that is capable of specifically binding CD8 and a CL domain; and the third polypeptide comprises, from N- to C-terminus, a third antigen binding domain comprising a scFv that specifically binds an antigen expressed by an undesired cell and a Fc or a fragment of the Fc, wherein the isolated molecule selectively activates or recruits CD8⁺ CTLs upon co-engagement of the TCR complex and CD8 and is unable to activate or recruit CD8⁺ CTLs in the absence of co-engagement of the TCR complex and CD8.

[0567] In some embodiments, the selective activation or recruitment of CD8⁺ CTLs comprises in vitro selective activation or recruitment of CD8⁺ CTLs.

[0568] In some embodiments, the selective activation or recruitment of CD8⁺ CTLs comprises ex vivo selective activation or recruitment of CD8⁺ CTLs.

[0569] In some embodiments, the selective activation or recruitment of CD8⁺ CTLs comprises in vivo selective activation or recruitment of CD8⁺ CTLs.

[0570] The disclosure also provides a method of selectively activating or recruiting CD8⁺ CTLs towards an undesired cell in a subject, comprising: administering to the subject an isolated molecule comprising a first antigen binding domain, a second antigen binding domain and a third antigen binding domain, wherein the first antigen binding domain specifically binds CD8, the second antigen binding domain specifically binds a TCR complex and the third antigen binding domain specifically binds an antigen expressed by an undesired cell, wherein the isolated molecule selectively activates or recruits CD8⁺ CTLs upon co-engagement of the TCR complex and CD8 and is unable to activate or recruit CD8⁺ CTLs in the absence of co-engagement of the TCR complex and CD8.

[0571] In some embodiments, the first antigen binding domain specifically binds CD8 and the second antigen binding domain specifically binds the TCR complex with affinities that result in activation or recruitment of CD8⁺ CTLs only upon co-engagement of the TCR complex and CD8.

[0572] In some embodiments, the first antigen binding domain, the second antigen binding domain or the third antigen binding domain comprises a scFv, a Fab, a Fab′, a F(ab′)₂, a Fd, a Fv, a domain antibody (dAb), a VHH, a VH, a LV, a non-antibody scaffold, or fragments thereof.

[0573] In some embodiments, the first antigen binding domain comprises the Fab In some embodiments, the second antigen binding domain comprises the scFv. In some embodiments, the third antigen binding domain comprises the scFv.

[0574] In some embodiments, the isolated molecule comprises: a first polypeptide comprising, from N- to C-terminus, the second antigen binding domain comprising the scFv, a VH that is capable of specifically binding CD8, a CH1 domain, a hinge, a CH2 domain and a CH3 domain; a second polypeptide comprising, from N- to C-terminus, a VL that is capable of specifically binding CD8 and a CL domain; and a third polypeptide comprising, from N- to C-terminus, the third antigen binding domain comprising the scFv and a Fc or a fragment of the Fc.

[0575] In some embodiments, the isolated molecule comprises: a first polypeptide comprising, from N- to C-terminus, a VH that is capable of specifically binding CD8, a CH1 domain, a hinge, a CH2 domain and a CH3 domain; a second polypeptide comprising, from N- to C-terminus, a VL that is capable of specifically binding CD8, a CL domain and the second antigen binding domain comprising the scFv; and a third polypeptide comprising, from N- to C-terminus, the third antigen binding domain comprising the scFv and a Fc or a fragment of the Fc.

[0576] In some embodiments, the isolated molecule comprises: a first polypeptide comprising, from N- to C-terminus, a VH that is capable of specifically binding CD8, a CH1 domain, a hinge, a CH2 domain, a CH3 domain and the second antigen binding domain comprising the scFv; a second polypeptide comprising, from N- to C-terminus, a VL that is capable of specifically binding CD8 and a CL domain; and a third polypeptide comprising, from N- to C-terminus, the third antigen binding domain comprising the scFv and a Fc or a fragment of the Fc.

[0577] In some embodiments, the first antigen binding domain comprising the Fab, the second antigen binding domain comprising the scFv or the third antigen binding domain comprising the scFv is conjugated to the Fc or the fragment of the Fc, to the VH that is capable of specifically biding CD8, to the CL domain or to the CH3 domain via a linker.

[0578] In some embodiments, the linker comprises a polypeptide of SEQ ID NOs: 2183-2290.

[0579] In some embodiments, the fragment of the Fc comprises a CH2 domain and a CH3 domain.

[0580] In some embodiments, the CH3 domain comprises one or more substitutions when compared to a wild-type CH3 domain.

[0581] In some embodiments, the one or more substitutions comprise T350V, L351Y, F405A, Y407V, T366Y, T366W, F405W, T394W, T394S, Y407T, Y407A, T366S/L368A/Y407V, L351Y/F405A/Y407V, T366I/K392M/T394W, F405A/Y407V, T366L/K392M/T394W, L351Y/Y407A, T366A/K409F, L351Y/Y407A, T366V/K409F, T366A/K409F, T350V/L351Y/F405A/Y407V or T350V/T366L/K392L/T394W, wherein residue numbering is according to the EU index.

[0582] In some embodiments, the first antigen binding domain comprising the Fab, the second antigen binding domain comprising the scFv or the third antigen binding domain comprising the scFv is conjugated to the Fc or the fragment of the Fc, to the VH that is capable of specifically biding CD8, to the CL domain or to the CH3 domain via a linker.

[0583] In some embodiments, the linker comprises a polypeptide of SEQ ID NOs: 2183-2290.

[0584] In some embodiments, the first polypeptide comprises a CH3 domain comprising one or more substitutions when compared to a wild-type CH3 domain which promote heterodimerization of the first polypeptide with the third polypeptide; the third polypeptide comprises a CH3 domain comprising one or more substitutions when compared to the wild-type CH3 domain which promote heterodimerization of the third polypeptide with the first polypeptide; or the first polypeptide comprises the CH3 domain comprising one or more substitutions when compared to the wild-type CH3 which promote heterodimerization of the first polypeptide with the third polypeptide and the third polypeptide comprises the CH3 domain comprising one or more substitutions when compared to the wild-type CH3 which promote heterodimerization of the third polypeptide with the first polypeptide.

[0585] In some embodiments, the one or more substitutions comprise T350V, L351Y, F405A, Y407V, T366Y, T366W, F405W, T394W, T394S, Y407T, Y407A, T366S/L368A/Y407V, L351Y/F405A/Y407V, T366I/K392M/T394W, F405A/Y407V, T366L/K392M/T394W, L351Y/Y407A, T366A/K409F, L351Y/Y407A, T366V/K409F, T366A/K409F, T350V/L351Y/F405A/Y407V or T350V/T366L/K392L/T394W, wherein residue numbering is according to the EU index.

[0586] In some embodiments, the Fc, the CH2 domain or the CH3 domain is an IgG1, IgG2, IgG3 or IgG4 isotype.

[0587] In some embodiments, the second antigen binding domain specifically binds CD3, TCRα chain, TCRβ chain, TCRγ chain or TCRδ chain, or any combination thereof.

[0588] In some embodiments, the TCRβ chain comprises TCRVB17.

[0589] In some embodiments, CD3 comprises CD3ε, CD3γ, CD3δ or CD3ζ.

[0590] In some embodiments, the second antigen binding domain that specifically binds CD3 comprises the HCDR1 of SEQ ID NO: 2291, the HCDR2 of SEQ ID NO: 2292, the HCDR3 of SEQ ID NO: 2293, the LCDR1 of SEQ ID NO: 2294, the LCDR2 of SEQ ID NO: 2295 and the LCDR3 of SEQ ID NO: 2296.

[0591] In some embodiments, the second antigen binding domain that specifically binds CD3 comprises the VH of SEQ ID NO: 2297 and the VL of SEQ ID NO: 2298.

[0592] In some embodiments, the first antigen binding domain comprises the HCDR1 of SEQ ID NO: 2307, the HCDR2 of SEQ ID NO: 2308, the HCDR3 of SEQ ID NO: 2309, the LCDR1 of SEQ ID NO: 2310, the LCDR2 of SEQ ID NO: 2311 and the LCDR3 of SEQ ID NO: 2312.

[0593] In some embodiments, the first antigen binding domain comprises the VH of SEQ ID NO: 2313 and the VL of SEQ ID NO: 2314.

[0594] In some embodiments, the undesired cell is a pathogenic cell.

[0595] In some embodiments, the undesired cell is a cancer cell, an infected cell, a virus infected cell, a bacterial infected cell, an immune cell, an inflamed cell, a damaged cells, a foreign cell, an apoptotic cell, a dysplastic cell, an immunogenic cell, a metaplastic cell or a mutant cell, or any combination thereof.

[0596] In some embodiments, the subject has a cancer, a viral infection, or an immune-mediated disease.

[0597] In some embodiments, the cancer is a hematological malignancy or a solid tumor.

[0598] In some embodiments, the hematological malignancy comprises acute lymphoblastic leukemia, acute myeloid leukemia, anaplastic large-cell lymphoma, Burkitt's lymphoma, chronic lymphocytic leukemia, chronic myeloid leukemia, diffuse large B-cell lymphoma, dendritic cell neoplasm, follicular lymphoma, hairy cell leukemia, Hodgkin's lymphoma, leukemia, B cell leukemia, T cell leukemia, light chain amyloidosis, lymphoma, B cell lymphoma, NK cell lymphoma, T cell lymphoma, mantle-cell lymphoma, marginal zone B-cell lymphoma, monoclonal gammopathy of undetermined significance, mucosa-associated lymphatic tissue lymphoma, multiple myeloma, myelodysplastic syndrome, non-Hodgkin's lymphoma, plasma cell leukemia, precursor B-cell lymphoblastic leukemia, smoldering multiple myeloma or Waldenstrom's macroglobulinemia, or any combination thereof. In some embodiments, hematological malignancy comprises B cell malignancies. In some embodiments, hematological malignancy comprises T cell malignancies. In some embodiments, hematological malignancy comprises NK cell malignancies.

[0599] Exemplary B-cell non-Hodgkin's lymphomas are a lymphomatoid granulomatosis, a primary effusion lymphoma, an intravascular large B-cell lymphoma, a mediastinal large B-cell lymphoma, heavy chain diseases (including γ, μ, and a disease), lymphomas induced by therapy with immunosuppressive agents, such as cyclosporine-induced lymphoma, and methotrexate-induced lymphoma.

[0600] In some embodiments, the solid tumor comprises adenocarcinoma, anal cancer, basal cell carcinoma, biliary tract cancer, bladder cancer, bone cancer, breast cancer, cancer associated with infection, cancer of the adrenal gland, cancer of the endocrine system, cancer of the head or neck, cancer of the parathyroid gland, cancer of the penis, cancer of the thyroid gland, cancer of the urethra, cervical cancer, carcinoma of the breast, carcinoma of the fallopian tubes, carcinoma of the liver, carcinoma of the lung, carcinoma of the prostate, carcinoma of the renal pelvis, carcinoma of the vagina, carcinoma of the vulva, choriocarcinoma, clear cell carcinoma, colon cancer, colon carcinoma, colorectal cancer, connective tissue cancer, cutaneous or intraocular malignant melanoma, environmentally induced cancer, gastric cancer, gastrointestinal cancer, glioma, glioblastoma, endometrial cancer, epithelial cancer, esophageal cancer, eye cancer, larynx cancer, liver cancer, hepatocellular carcinoma, hormone refractory prostate adenocarcinoma, Kaposi's sarcoma, kidney cancer, lung cancer gastro-esophageal cancer, melanoma, mesothelioma, Merkel cell cancer, neuroblastoma, non-small cell lung cancer (NSCLC), osteosarcoma, ovarian cancer, pancreatic cancer, prostate cancer, rectal cancer, renal cell carcinoma, retinoblastoma rhabdomyosarcoma, squamous cell cancer, soft tissue sarcoma, solid tumors of childhood, spinal axis tumor, stomach cancer, testicular cancer, thyroid cancer, uterine cancer, urothelial carcinoma or sarcomas, or any combination thereof.

[0601] In some embodiments, the cancer is a relapsed cancer. In some embodiments, the cancer is a refractor cancer. In some embodiments, the subject is treatment naïve.

[0602] In some embodiments, the viral infection is infection with adenovirus, arboviral encephalitis virus, coronavirus, coxsackie virus, cytomegalovirus (CMV), dengue virus, echovirus, Epstein Barr virus, flaviviruses, human immunodeficiency virus (HIV), hepatitis A virus, hepatitis B virus, hepatitis C virus, herpes virus, HTLV virus, influenza virus, JC virus, measles virus, molluscum virus, mumps virus, papillomavirus, parvovirus, poliovirus, rabies virus, respiratory syncytial virus, rhinovirus, rotavirus, rubella virus or vaccinia virus, bacteria, virus, fungi, protozoa, parasite or prion, or any combination thereof.

[0603] In some embodiments, the immune-mediated disease is an autoimmune disease or an inflammatory disease. In some embodiments, the autoimmune disease comprises systemic lupus erythematosus (SLE), ankylosing spondylitis, Chagas disease, chronic obstructive pulmonary disease, Crohn's Disease, dermatomyositis, diabetes mellitus type 1, endometriosis, Goodpasture's syndrome, Graves' disease, Guillain-Barre syndrome (GBS), Hashimoto's disease, hidradenitis suppurativa, Kawasaki disease, IgA nephropathy, idiopathic thrombocytopenic purpura, interstitial cystitis, mixed connective tissue disease, morphea, multiple sclerosis, myasthenia gravis, narcolepsy, neuromyotonia, pemphigus vulgaris, pernicious anaemia, psoriasis, psoriatic arthritis, polymyositis, primary biliary cirrhosis, relapsing polychondritis, rheumatoid arthritis (RA), sarcoidosis, schizophrenia, scleroderma, Sjogren's syndrome, temporal arteritis, ulcerative colitis, vasculitis, vitiligo, Wegener's granulomatosis, IgG4-related disease, anti-synthetase syndrome, and autoimmunity associated with immunodeficiency including chronic variable immunodeficiency, Wiskott-Aldrich syndrome, Good syndrome, IgA deficiency, Hyper IgM syndrome, and complement disorders. In some embodiments, the subject to has or likely to develop allograft rejection.

[0604] In some embodiments, subjects have an autoantibody-associated condition. In some embodiments, the an autoantibody-associated condition comprises seropositive RA, SLE, postmyocardial infarction syndrome, subacute bacterial endocarditis, anti-glomerular basement membrane nephritis, autoimmune hepatitis, primary biliary cirrhosis, alopecia areata, bullous pemphigoid, cicatricial pemphigoid, dermatitis herpetiformis, gestational pemphigoid, pemphigus vulgaris, systemic scleroderma, Addison's disease, autoimmune polyendocrine syndrome type 2, autoimmune pancreatitis, diabetes mellitus type 1, autoimmune thyroiditis, Graves' disease, Sjogren's syndrome, celiac disease, antiphospholipid syndrome, autoimmune thrombocytopenic purpura, cold agglutinin disease, pernicious anemia, thrombocytopenia, adult onset Still's disease, CREST syndrome, drug-induced lupus, enthesitis-related arthritis, juvenile arthritis, mixed connective tissue disease, palindromic rheumatism, Parry Romberg syndrome, rheumatic fever, undifferentiated connective tissue disease, dermatomysitis, myasthenia gravis, neuromyotonia, paraneoplastic cerebellar degeneration, polymyositis, Bickerstaff s encephalitis, chronic inflammatory demyelinating polyneuropathy, Guillain-Barre syndrome, Hashimoto's encephalopathy, Lambert-Eaton myasthenic syndrome, multiple sclerosis, progressive inflammatory neuropathy, Stiff person syndrome, autoimmune uveitis, neuromyelitis optica, symphathetic ophthalmia, Meniere's disease, anti-neutrophil cytoplasmic antibody-associated vasculitis, Churg-Strauss syndrome, Henoch-Schonlein purpura, microscopic polyangiitis, urticarial vasculitis, and vasculitis. Examples of autoantibody-associated autoimmune conditions include gastritis and POEMS syndrome. Examples of autoantibody-associated (non-autoimmune) diseases include agammaglobulinemia, amyotrophic lateral sclerosis, Castleman's disease, cutaneous leukocytoclastic angiitis, eczema, eosinophilic gastroenteritis, erythroblastosis fetalis, fibrodysplasia ossificans progressive, hypogammaglobulinemia, idiopathic pulmonary fibrosis, IgA nephropathy, Majeed syndrome, narcolepsy, Rasmussen's encephalitis, spondyloarthropathy or Sweet's syndrome.

[0605] In some embodiments, the antigen expressed by the undesired cell comprises mesothelin, alpha-fetoprotein (ALP), BAGE, BCR-ABL, beta-catenin, beta-HCG, BrE3-antigen, BCA225, BCMA, BTAA, CA125, CA195, CA242, CA-50, CAM43, CAMEL, CAP-1, carbonic anhydrase IX, CA19-9, CA72-4, CAM 17.1, CASP-8, CCCL19, CCCL21, CD1, CD 1a, CD2, CD4, CD5, CD11A, CD14, CD15, CD16, CD18, CD19, CD20, CD21, CD22, CD23, CD25, CD29, CD30, CD32b, CD33, CD37, CD38, CD40, CD40L, CD44, CD45, CD46, CD47, CD52, CD54, CD55, CD59, CD64, CD66a-e, CD67, CD68, CD70, CD70L, CD74, CD79a, CD79b, CD80, CD83, CD95, CD123, CD126, CD132, CD133, CD138, CD147, CD154, CDC27, CDK4, CDK4m, CDKN2A, CO-029, CTLA4, CXCR4, CXCR7, CXCL12, HIF-1a, colon-specific antigen-p (CSAp), CEACAM5) CEACAM6, c-Met, DAM, E2A-PRL, EGFR, EGFRvIII, EGP-1, EGP-2, ELF2-M, Ep-CAM, FGF, FGF-5, Flt-1, Flt-3, folate receptor, G250 antigen, Ga733VEpCAM, GAGE, gplOO, GRO-b, H4-RET, HLA-DR, HM1.24, human chorionic gonadotropin (HCG) HER2, HER3, HMGB-1, HIF-1, HSP70-2M, HST-2, HTgp-175, la, IGF-1R, IFN-g, IFN-α, IFN-b, IFN-1, IL-4R, IL-6R, IL-13R, IL-15R, IL-17R, IL-18R, IL-2, IL-6, IL-8, IL-12, IL-15, IL-17, IL-18, IL-23, IL-25, insulin-like growth factor-1 (IGF-1), KC4-antigen, KLK2, KSA, KS-1-antigen, KS1-4, LAGE-1a, Le-Y, LDR/FUT, M344, MA-50, macrophage migration inhibitory factor (MIF), MAGE, MAGE-1, MAGE-3, MAGE-4, MAGE-5, MAGE-6, MART-1, MART-2, TRAG-3, MCP-1, MIP-1A, MIP-1B, MIF, MG7-Ag, MOV18, MUC1, MUC2, MUC3, MUC4, MUC5ac, MUC13, MUC16, MUM-1/2, MUM-3, MYL-RAR, NB/70K, Nm23H1, NuMA, NCA66, NCA95, NCA90, NY-ESO-1, p15, p16, p185erbB2, p180erbB3, PAM4 antigen, pancreatic cancer mucin, PD-1, PD-L1, PD-L2, PI5, placental growth factor, p53, PLAGL2, Pmel17 prostatic acid phosphatase, PSA, PRAME, PSMA, PlGF, ILGF, ILGF-1R, IL-6, IL-25, RCAS1, RS5, RAGE, RANTES, Ras, T101, SAGE, 5100, SLAMF7, survivin, survivin-2B, SDDCAG16, TA-90\Mac2 binding protein, TAAL6, TAC, TAG-72, TLP, tenascin, TMEFF2, TRAIL receptors, TRP-1, TRP-2, TSP-180, VEGFR, ED-B fibronectin, WT-1, 17-1A-antigen, C3, C3a, C3b, C5a, C5, bcl-2, K-ras, tumor neoantigen, a viral antigen associated with cancer, FcγRIIB, IL-12β2R, CD28, CD56, CD11c, CD66b, CD41, CD61, CD62, CD235a, CD146, CD326, or CD203c, or any combination thereof.

[0606] In some embodiments, the antigen expressed by the undesired cell is BCMA. In some embodiments, the antigen expressed by the undesired cell is PSMA.

[0607] In some embodiments, the isolated molecule is an antibody or a non-antibody molecule.

[0608] In some embodiments, the antibody comprises a first half molecule and a second half molecule, wherein the first half molecule comprises the first antigen binding domain and the second antigen binding domain and the second half molecule comprises the third antigen binding domain.

[0609] The isolated molecules and multispecific molecules comprising an antigen binding domain that specifically binds BCMA disclosed herein may be used in the treatment of multiple myeloma (MM).

[0610] In some embodiments, the multiple myeloma is a newly diagnosed multiple myeloma.

[0611] In some embodiments, the multiple myeloma is a relapsed or a refractory multiple myeloma.

[0612] In some embodiments, the multiple myeloma is a high-risk multiple myeloma.

[0613] Subjects with high-risk multiple myeloma are known to relapse early and have poor prognosis and outcome. Subjects can be classified as having high-risk multiple myeloma is they have one or more of the following cytogenetic abnormalities: t(4;14)(p16;q32), t(14;16)(q32;q23), del17p, 1qAmp, t(4;14)(p16;q32) and t(14;16)(q32;q23), t(4;14)(p16;q32) and del17p, t(14;16)(q32;q23) and del17p, or t(4;14)(p16;q32), t(14;16)(q32;q23) and del17p.

[0614] In some embodiments, the subject having the high-risk multiple myeloma has one or more chromosomal abnormalities comprising: t(4;14)(p16;q32), t(14;16)(q32;q23), del1′7p, 1qAmp, t(4;14)(p16;q32) and t(14;16)(q32;q23), t(4;14)(p16;q32) and del17p, t(14;16)(q32;q23) and del17p; or t(4;14)(p16;q32), t(14;16)(q32;q23) and del17p, or any combination thereof.

[0615] Various qualitative and/or quantitative methods may be used to determine relapse or refractory nature of the disease. Symptoms that may be associated are for example a decline or plateau of the well-being of the patient or re-establishment or worsening of various symptoms associated with solid tumors, and/or the spread of cancerous cells in the body from one location to other organs, tissues or cells.

[0616] The cytogenetic abnormalities can be detected for example by fluorescent in situ hybridization (FISH). In chromosomal translocations, an oncogene is translocated to the IgH region on chromosome 14q32, resulting in dysregulation of these genes. t(4;14)(p16;q32) involves translocation of fibroblast growth factor receptor 3 (FGFR3) and multiple myeloma SET domain containing protein (MMSET) (also called WHSC1/NSD2), and t(14;16)(q32;q23) involves translocation of the MAF transcription factor C-MAF. Deletion of 17p (del17p) involves loss of the p53 gene locus.

[0617] In some embodiments, the multiple myeloma is relapsed or refractory to treatment with the anti-CD38 antibody, lenalinomide, bortezomib, pomalidomide, carfilzomib, elotozumab, ixazomib, melphalan or thalidomide, or any combination thereof.

[0618] In some embodiments, the multiple myeloma is relapsed or refractory to treatment with the anti-CD38 antibody. In some embodiments, the multiple myeloma is relapsed or refractory to treatment with lenalinomide. In some embodiments, the multiple myeloma is relapsed or refractory to treatment with bortezomib. In some embodiments, the multiple myeloma is relapsed or refractory to treatment with pomalidomide. In some embodiments, the multiple myeloma is relapsed or refractory to treatment with carfilzomib. In some embodiments, the multiple myeloma is relapsed or refractory to treatment with elotozumab. In some embodiments, the multiple myeloma is relapsed or refractory to treatment with ixazomib. In some embodiments, the multiple myeloma is relapsed or refractory to treatment with melphalan. In some embodiments, the multiple myeloma is relapsed or refractory to treatment with or thalidomide.

[0619] The isolated molecules and multispecific molecules comprising an antigen binding domain that specifically binds PSMA disclosed herein may be used in the treatment of prostate cancer.

[0620] “Prostate cancer” is meant to include all types of cancerous growths within prostate or oncogenic processes, metastatic tissues or malignantly transformed cells, tissues, or organs, irrespective of histopathology type or stage of invasiveness.

[0621] In some embodiments, the prostate cancer is an adenocarcinoma.

[0622] In some embodiments, the prostate cancer is a metastatic prostate cancer. In some embodiments, the prostate cancer has metastasized to rectum, lymph node or bone, or any combination thereof.

[0623] In some embodiments, the prostate cancer is a relapsed or a refractory prostate cancer.

[0624] In some embodiments, the prostate cancer is a castration resistant prostate cancer.

[0625] In some embodiments, the prostate cancer is sensitive to an androgen deprivation therapy.

[0626] In some embodiments, the prostate cancer is insensitive to the androgen deprivation therapy.

[0627] In some embodiments, the subject is treatment naïve.

[0628] In some embodiments, the subject has received androgen deprivation therapy.

[0629] In some embodiments, the subject has an elevated level of prostate specific antigen (PSA). PSA is elevated in a subject when the level is typically about ≥4.0 ng/mL. In some instances, elevated PSA may refer to level off ≥3.0 ng/mL. PSA levels may also be compared to post-androgen deprivation therapy levels.

[0630] Androgen deprivation therapies include abiraterone, ketoconazole, enzalutamide, galeterone, ARN-509 and orteronel (TAK-700), or prostatectomy.

### Enrichment and Detection Methods

[0631] The isolated molecules or the isolated multispecific antibodies of the disclosure can be used to selectively enrich, isolate, separate, purify, sort, select, capture or detect CD8⁺ CTLs. The isolated molecules or the isolated multispecific antibodies of the disclosure may be utilized in a bispecific format, e.g., containing a first antigen binding domain that specifically binds CD8 and a second antigen binding domain that specifically binds the TCR complex, or they may be utilized in a format that incorporates the third antigen binding domain that specifically binds a third antigen. In some embodiments, the third antigen is an inert antigen.

[0632] The disclosure provides a method of enriching, isolating, separating, purifying, sorting, selecting, capturing or detecting a CD8+ CTL comprising:

providing a sample comprising the CD8⁺ CTL;
contacting the sample with an isolated molecule comprising a first antigen binding domain and a second antigen binding domain, wherein the first antigen binding domain specifically binds CD8 and the second antigen binding domain specifically binds a TCR complex; and
enriching, isolating, separating, purifying, sorting, selecting, capturing or detecting the CD8⁺ CTL bound to the isolated molecule.

[0633] The disclosure provides a method of enriching a CD8+ CTL comprising:

providing a sample comprising the CD8⁺ CTL;
contacting the sample with an isolated molecule comprising a first antigen binding domain and a second antigen binding domain, wherein the first antigen binding domain specifically binds CD8 and the second antigen binding domain specifically binds a TCR complex; and enriching the CD8⁺ CTL bound to the isolated molecule.

[0634] The disclosure provides a method of isolating a CD8+ CTL comprising:

providing a sample comprising the CD8⁺ CTL;
contacting the sample with an isolated molecule comprising a first antigen binding domain and a second antigen binding domain, wherein the first antigen binding domain specifically binds CD8 and the second antigen binding domain specifically binds a TCR complex; and isolating the CD8⁺ CTL bound to the isolated molecule.

[0635] The disclosure provides a method of separating a CD8+ CTL comprising:

providing a sample comprising the CD8⁺ CTL;
contacting the sample with an isolated molecule comprising a first antigen binding domain and a second antigen binding domain, wherein the first antigen binding domain specifically binds CD8 and the second antigen binding domain specifically binds a TCR complex; and
separating the CD8⁺ CTL bound to the isolated molecule.

[0636] The disclosure provides a method of purifying a CD8+ CTL comprising:

providing a sample comprising the CD8⁺ CTL;
contacting the sample with an isolated molecule comprising a first antigen binding domain and a second antigen binding domain, wherein the first antigen binding domain specifically binds CD8 and the second antigen binding domain specifically binds a TCR complex; and
purifying the CD8⁺ CTL bound to the isolated molecule.

[0637] The disclosure provides a method of sorting a CD8+ CTL comprising:

providing a sample comprising the CD8⁺ CTL;
contacting the sample with an isolated molecule comprising a first antigen binding domain and a second antigen binding domain, wherein the first antigen binding domain specifically binds CD8 and the second antigen binding domain specifically binds a TCR complex; and
sorting the CD8⁺ CTL bound to the isolated molecule.

[0638] The disclosure provides a method of selecting a CD8+ CTL comprising:

providing a sample comprising the CD8⁺ CTL;
contacting the sample with an isolated molecule comprising a first antigen binding domain and a second antigen binding domain, wherein the first antigen binding domain specifically binds CD8 and the second antigen binding domain specifically binds a TCR complex; and
selecting the CD8⁺ CTL bound to the isolated molecule.

[0639] The disclosure provides a method of capturing a CD8+ CTL comprising:

providing a sample comprising the CD8⁺ CTL;
contacting the sample with an isolated molecule comprising a first antigen binding domain and a second antigen binding domain, wherein the first antigen binding domain specifically binds CD8 and the second antigen binding domain specifically binds a TCR complex; and
capturing the CD8⁺ CTL bound to the isolated molecule.

[0640] The disclosure provides a method of detecting a CD8+ CTL comprising:

providing a sample comprising the CD8⁺ CTL;
contacting the sample with an isolated molecule comprising a first antigen binding domain and a second antigen binding domain, wherein the first antigen binding domain specifically binds CD8 and the second antigen binding domain specifically binds a TCR complex; and
detecting the CD8⁺ CTL bound to the isolated molecule.

[0641] The disclosure also provides a method of enriching, isolating, separating, purifying, sorting, selecting, capturing or detecting a CD8⁺ CTL, comprising:

contacting the CD8⁺ CTL with an isolated molecule comprising a first antigen binding domain and a second antigen binding domain, wherein the first antigen binding domain specifically binds CD8 and the second antigen binding domain specifically binds a TCR complex; and
enriching, isolating, separating, purifying, sorting, selecting, capturing or detecting the CD8⁺ CTL based on binding of the CD8⁺ CTL to the isolated molecule.

[0642] The disclosure also provides a method of enriching a CD8⁺ CTL, comprising:

contacting the CD8⁺ CTL with an isolated molecule comprising a first antigen binding domain and a second antigen binding domain, wherein the first antigen binding domain specifically binds CD8 and the second antigen binding domain specifically binds a TCR complex; and
enriching the CD8⁺ CTL based on binding of the CD8⁺ CTL to the isolated molecule.

[0643] The disclosure also provides a method of isolating a CD8⁺ CTL, comprising:

contacting the CD8⁺ CTL with an isolated molecule comprising a first antigen binding domain and a second antigen binding domain, wherein the first antigen binding domain specifically binds CD8 and the second antigen binding domain specifically binds a TCR complex; and
isolating the CD8⁺ CTL based on binding of the CD8⁺ CTL to the isolated molecule.

[0644] The disclosure also provides a method of separating a CD8⁺ CTL, comprising: contacting the CD8⁺ CTL with an isolated molecule comprising a first antigen binding domain and a second antigen binding domain, wherein the first antigen binding domain specifically binds CD8 and the second antigen binding domain specifically binds a TCR complex; and separating the CD8⁺ CTL based on binding of the CD8⁺ CTL to the isolated molecule.

The disclosure also provides a method of purifying or detecting a CD8⁺ CTL, comprising:
[0645] contacting the CD8⁺ CTL with an isolated molecule comprising a first antigen binding domain and a second antigen binding domain, wherein the first antigen binding domain specifically binds CD8 and the second antigen binding domain specifically binds a TCR complex; and
   purifying the CD8⁺ CTL based on binding of the CD8⁺ CTL to the isolated molecule.

[0646] The disclosure also provides a method of a CD8⁺ CTL, comprising:

contacting the CD8⁺ CTL with an isolated molecule comprising a first antigen binding domain and a second antigen binding domain, wherein the first antigen binding domain specifically binds CD8 and the second antigen binding domain specifically binds a TCR complex; and
sorting the CD8⁺ CTL based on binding of the CD8⁺ CTL to the isolated molecule.

[0647] The disclosure also provides a method of selecting a CD8⁺ CTL, comprising:

contacting the CD8⁺ CTL with an isolated molecule comprising a first antigen binding domain and a second antigen binding domain, wherein the first antigen binding domain specifically binds CD8 and the second antigen binding domain specifically binds a TCR complex; and
selecting the CD8⁺ CTL based on binding of the CD8⁺ CTL to the isolated molecule.

[0648] The disclosure also provides a method of capturing a CD8⁺ CTL, comprising:

contacting the CD8⁺ CTL with an isolated molecule comprising a first antigen binding domain and a second antigen binding domain, wherein the first antigen binding domain specifically binds CD8 and the second antigen binding domain specifically binds a TCR complex; and
capturing the CD8⁺ CTL based on binding of the CD8⁺ CTL to the isolated molecule.

[0649] The disclosure also provides a method of detecting a CD8⁺ CTL, comprising:

contacting the CD8⁺ CTL with an isolated molecule comprising a first antigen binding domain and a second antigen binding domain, wherein the first antigen binding domain specifically binds CD8 and the second antigen binding domain specifically binds a TCR complex; and
detecting the CD8⁺ CTL based on binding of the CD8⁺ CTL to the isolated molecule.

[0650] In some embodiments, the sample is a blood sample or a tissue sample.

[0651] In some embodiments, the method is conducted in suspension or on a solid support.

[0652] In some embodiments, the method is conducted using beads, microfluidics, fluorescent cell sorting, chips, columns or surfaces.

[0653] In some embodiments, the isolated molecule further comprises a third antigen binding domain that specifically binds a third antigen.

[0654] In some embodiments, the first antigen binding domain, the second antigen binding domain or the third antigen binding domain comprises a scFv, a Fab, a Fab′, a F(ab′)₂, a Fd, a Fv, a dAb, a VHH, a VH, a VL, a non-antibody scaffold, or fragments thereof.

[0655] In some embodiments, the isolated molecule comprises: a first polypeptide comprising, from N- to C-terminus, the second antigen binding domain comprising the scFv, a VH that is capable of specifically binding CD8, a CH1 domain, a hinge, a CH2 domain and a CH3 domain; a second polypeptide comprising, from N- to C-terminus, a VL that is capable of specifically binding CD8 and a CL domain; and a third polypeptide comprising, from N- to C-terminus, the third antigen binding domain comprising the scFv and a Fc or a fragment of the Fc.

[0656] In some embodiments, the isolated molecule comprises: a first polypeptide comprising, from N- to C-terminus, a VH that is capable of specifically binding CD8, a CH1 domain, a hinge, a CH2 domain and a CH3 domain; a second polypeptide comprising, from N- to C-terminus, a VL that is capable of specifically binding CD8, a CL domain and the second antigen binding domain comprising the scFv; and a third polypeptide comprising, from N- to C-terminus, the third antigen binding domain comprising the scFv and a Fc or a fragment of the Fc.

[0657] In some embodiments, the isolated molecule comprises: a first polypeptide comprising, from N- to C-terminus, a VH that is capable of specifically binding CD8, a CH1 domain, a hinge, a CH2 domain, a CH3 domain and the second antigen binding domain comprising the scFv; a second polypeptide comprising, from N- to C-terminus, a VL that is capable of specifically binding CD8 and a CL domain; and a third polypeptide comprising, from N- to C-terminus, the third antigen binding domain comprising the scFv and a Fc or a fragment of the Fc.

[0658] In some embodiments, the first antigen binding domain comprising the Fab, the second antigen binding domain comprising the scFv or the third antigen binding domain comprising the scFv is conjugated to the Fc or the fragment of the Fc, to the VH that is capable of specifically biding CD8, to the CL domain or to the CH3 domain via a linker.

[0659] In some embodiments, the linker comprises a polypeptide of SEQ ID NOs: 2183-2290.

[0660] In some embodiments, the fragment of the Fc comprises a CH2 domain and a CH3 domain.

[0661] In some embodiments, the Fc, the CH2 domain or the CH3 domain is an IgG1, IgG2, IgG3 or IgG4 isotype.

[0662] In some embodiments, the second antigen binding domain specifically binds CD3, TCRα chain, TCRβ chain, TCRγ chain or TCRδ chain, or any combination thereof.

[0663] In some embodiments, the TCRβ chain comprises TCRVB17.

[0664] In some embodiments, CD3 comprises CD3ε, CD3γ, CD3δ or CD3ζ.

[0665] In some embodiments, the second antigen binding domain that specifically binds CD3 comprises the HCDR1 of SEQ ID NO: 2291, the HCDR2 of SEQ ID NO: 2292, the HCDR3 of SEQ ID NO: 2293, the LCDR1 of SEQ ID NO: 2294, the LCDR2 of SEQ ID NO: 2295 and the LCDR3 of SEQ ID NO: 2296.

[0666] In some embodiments, the second antigen binding domain that specifically binds CD3 comprises the VH of SEQ ID NO: 2297 and the VL of SEQ ID NO: 2298.

[0667] In some embodiments, the first antigen binding domain comprises the HCDR1 of SEQ ID NO: 2307, the HCDR2 of SEQ ID NO: 2308, the HCDR3 of SEQ ID NO: 2309, the LCDR1 of SEQ ID NO: 2310, the LCDR2 of SEQ ID NO: 2311 and the LCDR3 of SEQ ID NO: 2312.

[0668] In some embodiments, the first antigen binding domain comprises the VH of SEQ ID NO: 2313 and the VL of SEQ ID NO: 2314.

[0669] In some embodiments, the isolated molecule is an antibody or a non-antibody molecule.

[0670] In some embodiments, the antibody comprises a first half molecule and a second half molecule, wherein the first half molecule comprises the first antigen binding domain and the second antigen binding domain and the second half molecule comprises the third antigen binding domain.

[0671] Enrichment, isolation, separation, purification, sorting, selecting, capturing or detecting, or any combination thereof can be done using known technologies such as bead, microfluidics, solid support, columns etc. In general the isolated molecule of the disclosure, when bound to the CD8⁺ CTL may be separated or visualized using known methods.

[0672] The following examples are provided to further describe some of the embodiments disclosed herein. The examples are intended to illustrate, not to limit, the disclosed embodiments.

### EXAMPLES

### Example 1: Design and Generation of Trispecific Molecules Specifically Engaging Cd8⁺ CTLS

[0673] The approach to specifically engage CD8⁺ CTLs was to design and test multispecific molecules having a CD3 binding domain of various affinities, an agonistic CD8+ binding domain and a tumor associated antigen (TAA) binding domain and tailor the binding affinities within the range that would result in CD8⁺ T cell activation and tumor cell killing only in instances when co-engagement of CD3 and CD8 occurred. Towards that end, CD3 binding domains CD2B219 and CD3B450 were incorporated into a trispecific antibody together with OKT8, an agonistic CD8 binding antibody and a domain that binds the TAA. BCMA and PSMA binding domains were used to target the trispecific molecules to tumors. FIG. 1, FIG. 2 and FIG. 3 show the designed protein formats used in the study. In the Protein Format 1 (FIG. 1), the TAA binding arm was incorporated as a scFv coupled to a Fc (HC1_scFv), the CD8 binding arm was incorporated as a HC/LC chain (HC2 N-term and LC2 2^{nd} N-term), and the CD3 binding arm was incorporated as a scFv attached to the N-terminus of the CD8 binding HC (LC2 1^{st} N-term). In the Protein Format 2 (FIG. 2), the TAA binding arm was incorporated as a scFv coupled to the Fc (HC1_scFv), the CD8 binding arm was incorporated as a HC/LC chain (HC2 N-term and LC2 1^{st} N-term), and the CD3 binding arm was incorporated as a scFv attached to the C-terminus of the CD8 binding LC (LC2 C-term). In the Protein Format 3 (FIG. 3), the TAA binding arm was incorporated as a scFv coupled to the Fc (HC1_scFv), the CD8 binding arm was incorporated as a HC/LC chain (HC2 N-term and LC1 1^{st} N-term), and the CD3 binding arm was incorporated as a scFv attached to the C-terminus of the CD8 binding HC (HC2 C-term). To evaluate differences resulting from engagement of either CD3 or CD8 alone or co-engagement of CD3 and CD8, corresponding constructs were generated in which either the CD3 or the CD8 binding domain was replaced by the inert arm (RSV binding domain B21M) or not included at all (null). In some constructs, the TAA binding domain was excluded from the design.

[0674] The CD3 binding domain used were the VH/VL domains of CD3B219 or CD3B450 and the CD8 binding domain used were the VH/VL domain of OKT8. The amino acid sequences of the various domains are shown in Table 4. CD3B219 is considered a high affinity (low K_{D}) binder and CD3B450 is considered a low affinity (high K_{D}) binder. The K_{D} of CD3B219 was about 8 mM and the K_{D} of CD3B450 was about 80 nM for binding to CD3. The CD8 binding domain used were the VL/VL domains of OKT8. The amino acid sequences of OKT8 CDRs and VH/VL domains are shown in Table 5.

[0675] The trispecific molecules were cloned, expressed and purified using standard methods. To promote HC/HC heterodimerization, knob-in-hole mutations were introduced in the heavy chains.

TABLE 4

| CD3 | | | SEQ |
|---|---|---|---|
| binding | | | ID |
| domain | Region | Amino acid sequence | NO: |
| CD3B450 | HCDR1 | NNNAAWS | 2291 |
| | HCDR2 | RTYYRSKWLYDYAVSVKS | 2292 |
| | HCDR3 | GYSSSFDY | 2293 |
| | LCDR1 | TGTSSNIGTYKFVS | 2294 |
| | LCDR2 | EVSKRPS | 2295 |
| | LCDR3 | VSYAGSGTLL | 2296 |
| | VH | QVQLQQSGPGLVKPSQTLSLTCAI | 2297 |
| | | SGDSVFNNNAAWSWIRQSPSRGLE | |
| | | WLGRTYYRSKWLYDYAVSVKSRIT | |
| | | INPDTSKNQFSLQLNSVTPEDTAV | |
| | | YYCARGYSSSFDYWGQGTLVTVSS | |
| | VL | QSALTQPASVSGSPGQSITISCTG | 2298 |
| | | TSSNIGTYKFVSWYQQHPGKAPKV | |
| | | MIYEVSKRPSGVSNRFSGSKSGNT | |
| | | ASLTISGLQAEDEADYYCVSYAGS | |
| | | GTLLFGGGTKLTVL | |
| CD3B219 | HCDR1 | TYAMN | 2299 |
| | HCDR2 | RIRSKYNNYATYYAASVKG | 2300 |
| | HCDR3 | HGNFGNSYVSWFAY | 2301 |
| | LCDR1 | RSSTGAVTTSNYAN | 2302 |
| | LCDR2 | GTNKRAP | 2303 |
| | LCDR3 | ALWYSNLWV | 2304 |
| | VH | EVQLVESGGGLVQPGGSLRLSCAA | 2305 |
| | | SGFTFNTYAMNWVRQAPGKGLEWV | |
| | | ARIRSKYNNYATYYAASVKGRFTI | |
| | | SRDDSKNSLYLQMNSLKTEDTAVY | |
| | | YCARHGNFGNSYVSWFAYWGQGTL | |
| | | VTVSS | |
| | VL | QTVVTQEPSLTVSPGGTVTLTCRS | 2306 |
| | | STGAVTTSNYANWVQQKPGQAPRG | |
| | | LIGGTNKRAPGTPARFSGSLLGGK | |
| | | AALTLSGVQPEDEAEYYCALWYSN | |
| | | LWVFGGGTKLTVL | |

TABLE 5

| CD8 | | | SEQ |
|---|---|---|---|
| binding | | | ID |
| domain | Region | Amino acid sequence | NO: |
| OKT8 | HCDR1 | DTYIH | 2307 |
| | HCDR2 | RIDPANDNTLYASKFQG | 2308 |
| | HCDR3 | GYGYYVFDH | 2309 |
| | LCDR1 | RTSRSISQYLA | 2310 |
| | LCDR2 | SGSGS | 2311 |
| | LCDR3 | QQHNENPLT | 2312 |
| | VH | EVQLQQSGAELVKPGASVKLSCTAS | 2313 |
| | | GFNIKDTYIHFVRQRPEQGLEWIGR | |
| | | IDPANDNTLYASKFQGKATITADTS | |
| | | SNTAYMHLCSLTSGDTAVYYCGRGY | |
| | | GYYVFDHWGQGTTLTVSS | |
| | VL | DVQINQSPSFLAASPGETITINCRT | 2314 |
| | | SRSISQYLAWYQEKPGKTNKLLIYS | |
| | | GSTLQSGIPSRFSGSGSGTDFTLTI | |
| | | SGLEPEDFAMYYCQQHNENPLTFGA | |
| | | GTKLELR | |

[0676] The specific constructs generated incorporating CD3, CD8 and BCMA binding domains are shown in Table 6. Table 6 constructs 1-12 were engineered as Protein Format 1, constructs 13-17 and 31-36 were engineered as Protein Format 2, and constructs 19-30 were engineered as Protein Format 3. The specific constructs generated incorporating CD3, CD8 and PSMA binding domains are shown in Table 7. Table 7 constructs P3-P5, P15-P17, P21-P23 and P33-P35 were engineered as Protein Format 1, constructs P6-P8, P12-P14, P24-P26 and P30-P32 were engineered as Protein Format 2, and constructs P1, P2, P9-P11, P18-P20, P270P29 and P36 were engineered as Protein Format 3.

TABLE 6

| Construct | | HC2 | HC2 | LC2 | LC2 | LC2 |
|---|---|---|---|---|---|---|
| number | HC1_scFv | (N-term) | (C-term) | (1st N-term) | (2nd N-term) | (C-term) |
| 1 | BCMA-scFv | OKT8-Fab- | n/a | CD3B450-LH- | OKT8-LC | n/a |
| | | RF | | scFv | | |
| 2 | BCMA-scFv | OKT8-Fab- | n/a | CD3B219-LH- | OKT8-LC | n/a |
| | | RF | | scFv | | |
| 3 | BCMA-scFv | OKT8-Fab- | n/a | null-scFv | OKT8-LC | n/a |
| | | RF | | | | |
| 4 | BCMA-scFv | B21M-Fab- | n/a | CD3B450-LH- | B21M-LC | n/a |
| | | RF | | scFv | | |
| 5 | BCMA-scFv | B21M-Fab- | n/a | CD3B219-LH- | B21M-LC | n/a |
| | | RF | | scFv | | |
| 6 | BCMA-scFv | B21M-Fab- | n/a | null-scFv | B21M-LC | n/a |
| | | RF | | | | |
| 7 | null-scFv | OKT8-Fab- | n/a | CD3B450-LH- | OKT8-LC | n/a |
| | | RF | | scFv | | |
| 8 | null-scFv | OKT8-Fab- | n/a | CD3B219-LH- | OKT8-LC | n/a |
| | | RF | | scFv | | |
| 9 | null-scFv | OKT8-Fab- | n/a | null-scFv | OKT8-LC | n/a |
| | | RF | | | | |
| 10 | null-scFv | B21M-Fab- | n/a | CD3B450-LH- | B21M-LC | n/a |
| | | RF | | scFv | | |
| 11 | null-scFv | B21M-Fab- | n/a | CD3B219-LH- | B21M-LC | n/a |
| | | RF | | scFv | | |
| 12 | null-scFv | B21M-Fab- | n/a | null-scFv | B21M-LC | n/a |
| | | RF | | | | |
| 13 | BCMA-scFv | OKT8-Fab- | n/a | OKT8-LC | n/a | CD3B450-LH- |
| | | RF | | | | scFv |
| 14 | BCMA-scFv | OKT8-Fab- | n/a | OKT8-LC | n/a | CD3B219-LH- |
| | | RF | | | | scFv |
| 15 | BCMA-scFv | OKT8-Fab- | n/a | OKT8-LC | n/a | null-scFv |
| | | RF | | | | |
| 16 | BCMA-scFv | B21M-Fab- | n/a | B21M-LC | n/a | CD3B450-LH- |
| | | RF | | | | scFv |
| 17 | BCMA-scFv | B21M-Fab- | n/a | B21M-LC | n/a | CD3B219-LH- |
| | | RF | | | | scFv |
| 18 | BCMA-scFv | B21M-Fab- | n/a | B21M-LC | n/a | null-scFv |
| | | RF | | | | |
| 34 | null-scFv | OKT8-Fab- | n/a | OKT8-LC | n/a | CD3B450-LH- |
| | | RF | | | | scFv |
| 35 | null-scFv | OKT8-Fab- | n/a | OKT8-LC | n/a | CD3B219-LH- |
| | | RF | | | | scFv |
| 36 | null-scFv | OKT8-Fab- | n/a | OKT8-LC | n/a | null-scFv |
| | | RF | | | | |
| 31 | null-scFv | B21M-Fab- | n/a | B21M-LC | n/a | CD3B450-LH- |
| | | RF | | | | scFv |
| 32 | null-scFv | B21M-Fab- | n/a | B21M-LC | n/a | CD3B219-LH- |
| | | RF | | | | scFv |
| 33 | null-scFv | B21M-Fab- | n/a | B21M-LC | n/a | null-scFv |
| | | RF | | | | |
| 19 | BCMA-scFv | OKT8-Fab- | CD3B450-LH- | OKT8-LC | n/a | n/a |
| | | RF | scFv | | | |
| 20 | BCMA-scFv | OKT8-Fab- | CD3B219-LH- | OKT8-LC | n/a | n/a |
| | | RF | scFv | | | |
| 21 | BCMA-scFv | OKT8-Fab- | null-scFv | OKT8-LC | n/a | n/a |
| | | RF | | | | |
| 22 | BCMA-scFv | B21M-Fab- | CD3B450-LH- | B21M-LC | n/a | n/a |
| | | RF | scFv | | | |
| 23 | BCMA-scFv | B21M-Fab- | CD3B219-LH- | B21M-LC | n/a | n/a |
| | | RF | scFv | | | |
| 24 | BCMA-scFv | B21M-Fab- | null-scFv | B21M-LC | n/a | n/a |
| | | RF | | | | |
| 25 | null-scFv | OKT8-Fab- | CD3B450-LH- | OKT8-LC | n/a | n/a |
| | | RF | scFv | | | |
| 26 | null-scFv | OKT8-Fab- | CD3B219-LH- | OKT8-LC | n/a | n/a |
| | | RF | scFv | | | |
| 27 | null-scFv | OKT8-Fab- | null-scFv | OKT8-LC | n/a | n/a |
| | | RF | | | | |
| 28 | null-scFv | B21M-Fab- | CD3B450-LH- | B21M-LC | n/a | n/a |
| | | RF | scFv | | | |
| 29 | null-scFv | B21M-Fab- | CD3B219-LH- | B21M-LC | n/a | n/a |
| | | RF | scFv | | | |
| 30 | null-scFv | B21M-Fab- | null-scFv | B21M-LC | n/a | n/a |
| | | RF | | | | |

TABLE 7

| Construct | | HC2 | HC2 | LC2 | LC2 | LC2 |
|---|---|---|---|---|---|---|
| number | HC1_scFv | (N-term) | (C-term) | (1st N-term) | (2nd N-term) | (C-term) |
| P4 | PSMA-scFv | OKT8-Fab- | n/a | CD3B450-LH- | OKT8-LC | n/a |
| | | RF | | scFv | | |
| P3 | PSMA-scFv | OKT8-Fab- | n/a | CD3B219-LH- | OKT8-LC | n/a |
| | | RF | | scFv | | |
| P5 | PSMA-scFv | OKT8-Fab- | n/a | null-scFv | OKT8-LC | n/a |
| | | RF | | | | |
| P16 | PSMA-scFv | B21M-Fab- | n/a | CD3B450-LH- | B21M-LC | n/a |
| | | RF | | scFv | | |
| P15 | PSMA-scFv | B21M-Fab- | n/a | CD3B219-LH- | B21M-LC | n/a |
| | | RF | | scFv | | |
| P17 | PSMA-scFv | B21M-Fab- | n/a | null-scFv | B21M-LC | n/a |
| | | RF | | | | |
| P22 | null-scFv | OKT8-Fab- | n/a | CD3B450-LH- | OKT8-LC | n/a |
| | | RF | | scFv | | |
| P21 | null-scFv | OKT8-Fab- | n/a | CD3B219-LH- | OKT8-LC | n/a |
| | | RF | | scFv | | |
| P23 | null-scFv | OKT8-Fab- | n/a | null-scFv | OKT8-LC | n/a |
| | | RF | | | | |
| P34 | null-scFv | B21M-Fab- | n/a | CD3B450-LH- | B21M-LC | n/a |
| | | RF | | scFv | | |
| P33 | null-scFv | B21M-Fab- | n/a | CD3B219-LH- | B21M-LC | n/a |
| | | RF | | scFv | | |
| P35 | null-scFv | B21M-Fab- | n/a | null-scFv | B21M-LC | n/a |
| | | RF | | | | |
| P7 | PSMA-scFv | OKT8-Fab- | n/a | OKT8-LC | n/a | CD3B450-LH- |
| | | RF | | | | scFv |
| P6 | PSMA-scFv | OKT8-Fab- | n/a | OKT8-LC | n/a | CD3B219-LH- |
| | | RF | | | | scFv |
| P8 | PSMA-scFv | OKT8-Fab- | n/a | OKT8-LC | n/a | null-scFv |
| | | RF | | | | |
| P12 | PSMA-scFv | B21M-Fab- | n/a | B21M-LC | n/a | CD3B450-LH- |
| | | RF | | | | scFv |
| P13 | PSMA-scFv | B21M-Fab- | n/a | B21M-LC | n/a | CD3B219-LH- |
| | | RF | | | | scFv |
| P14 | PSMA-scFv | B21M-Fab- | n/a | B21M-LC | n/a | null-scFv |
| | | RF | | | | |
| P25 | null-scFv | OKT8-Fab- | n/a | OKT8-LC | n/a | CD3B450-LH- |
| | | RF | | | | scFv |
| P24 | null-scFv | OKT8-Fab- | n/a | OKT8-LC | n/a | CD3B219-LH- |
| | | RF | | | | scFv |
| P26 | null-scFv | OKT8-Fab- | n/a | OKT8-LC | n/a | null-scFv |
| | | RF | | | | |
| P30 | null-scFv | B21M-Fab- | n/a | B21M-LC | n/a | CD3B450-LH- |
| | | RF | | | | scFv |
| P31 | null-scFv | B21M-Fab- | n/a | B21M-LC | n/a | CD3B219-LH- |
| | | RF | | | | scFv |
| P32 | null-scFv | B21M-Fab- | n/a | B21M-LC | n/a | null-scFv |
| | | RF | | | | |
| P2 | PSMA-scFv | OKT8-Fab- | CD3B450-LH- | OKT8-LC | n/a | n/a |
| | | RF | scFv | | | |
| P1 | PSMA-scFv | OKT8-Fab- | CD3B219-LH- | OKT8-LC | n/a | n/a |
| | | RF | scFv | | | |
| P9 | PSMA-scFv | OKT8-Fab- | null-scFv | OKT8-LC | n/a | n/a |
| | | RF | | | | |
| P11 | PSMA-scFv | B21M-Fab- | CD3B450-LH- | B21M-LC | n/a | n/a |
| | | RF | scFv | | | |
| P10 | PSMA-scFv | B21M-Fab- | CD3B219-LH- | B21M-LC | n/a | n/a |
| | | RF | scFv | | | |
| P18 | PSMA-scFv | B21M-Fab- | null-scFv | B21M-LC | n/a | n/a |
| | | RF | | | | |
| P20 | null-scFv | OKT8-Fab- | CD3B450-LH- | OKT8-LC | n/a | n/a |
| | | RF | scFv | | | |
| P19 | null-scFv | OKT8-Fab- | CD3B219-LH- | OKT8-LC | n/a | n/a |
| | | RF | scFv | | | |
| P27 | null-scFv | OKT8-Fab- | null-scFv | OKT8-LC | n/a | n/a |
| | | RF | | | | |
| P29 | null-scFv | B21M-Fab- | CD3B450-LH- | B21M-LC | n/a | n/a |
| | | RF | scFv | | | |
| P28 | null-scFv | B21M-Fab- | CD3B219-LH- | B21M-LC | n/a | n/a |
| | | RF | scFv | | | |
| P36 | null-scFv | B21M-Fab- | null-scFv | B21M-LC | n/a | n/a |
| | | RF | | | | |

### Example 2: Co-Engagement of CD3 and CD8 Results in Tumor Cell Death and Activation of T Cells

[0677] All constructs were tested for their ability to mediate tumor cell death and to activate T cells using known methods.

[0678] Table 8 shows the results of % tumor cell death and % T cell activation (as assessed by % CD25⁺ live T cells) of trispecific BCMA×CD3×CD8 antibodies and controls. Table 9 shows the results of % tumor cell death and % T cell activation of trispecific PSMA×CD3×CD8 antibodies and controls. As is shown in Table 8, constructs with low affinity CD3 binding domain mediated tumor cell death and T cell activation only via co-engagement with CD8 in the context of multispecific CD3×CD8×BCMA antibodies (construct number 1, 13, 19). Constructs with high affinity CD3 binding domain mediated tumor cell death and T cell activation without co-engagement with CD8 (constructs 15, 17, 23). Further, constructs with high affinity CD3 binding domain and CD8 binding domain without TAA binding domain were able to mediate tumor cell killing and to activate T cells (Table 8, construct 8, 35 and Table 9, constructs P21 and P24). Similarly, as is shown in Table 9, trispecific antibodies binding PSMA with high affinity CD3 domains were able to mediate tumor cell killing and T cell activation only in the presence of CD8 co-engagement. Table 10 and Table 11 shows cytokine production by T cells contacted with BCMA×CD3×CD8 trispecific antibodies or controls and Table 12 and Table 13 show cytokine production by T cells contacted with PSMA×CD3×CD8 trispecifc antibodies or controls as shown in the Tables. In general, cytokine release, tumor killing and T-cell activation by T cells appeared comparable. Overall data indicated that the trispecific constructs with CD8 antibody plus high affinity CD3 binding domain CD3B450 appeared to be weaker in releasing IFNγ than the constructs with CD8 antibody and the high affinity CD3 binding domain CD3B219. The null controls with no TAA but with CD8 and CD3 domains appeared to show some very weak cytokine activity. Overall IFNγ, IL-10 and TNFα levels appeared to be released at higher levels than the rest of the cytokines from the panel.

[0679] Cytotoxicity was measured in a real-time cell analyzer xCELLigence (Roche) using adherent tumor cell lines as target cells. All experiments were performed using the respective target cell culturing media. Fifty microliters of medium was added to E-Plates 96 (Roche, Grenzach-Wyhlen, Germany) for measurement of background values. Target cells used in the experiments include C4-2B, LnCap MM1R, H929 tumor cell lines. Target cells were seeded in an additional 100 μl medium at a density of around 10,000 cells per well. Suitable cell densities were determined by previous titration experiments. Cell attachment was monitored using the RTCA SP (Roche) instrument and the RTCA software Version 1.1 (Roche) until the plateau phase was reached. T cells were added at variant dosages of trispecific antibodies. Upon addition of effector cells, impedance measurements were performed every 15 min for up to 81 h. All experiments were performed in triplicates. Changes in electrical impedance were expressed as a dimensionless cell index (CI) value, which derives from relative impedance changes corresponding to cellular coverage of the electrode sensors, normalized to baseline impedance values with medium only. To analyze the acquired data, CI values were exported, and percentage of lysis was calculated in relation to the control cells lacking any effector T cells. The percentage of cytolysis is readily calculated using a simple formula: Percentage of cytolysis=((Cell Index no effector−Cell Index effector)/Cell Index no effector)×100. Cytotoxicity of the T cells was also tested by using the IncuCyte zoom living cell imaging system. Co-culture was set up the same as the above in xCELLigence assay. images were taken every 30 min and the number of dead cells was quantified.

[0680] The Intellicyt human T cell activation and cytokine profiling kit was applied for T cell activation and cytokine profile. Briefly, T cells were cocultured with prostate tumor cells at an effector to target cells ratio (E:T ratio) of 1 to 1 in 96-well round bottom plate in 200 ul RPMI complete media. The trispecific antibodies were co-cultured and 24 hr later, T cell activation was assessed by the TCA kit from a 30 ul cell/supernatant mixture sample following the protocol. Samples were acquired on the Intellicyt iQue Screener PLUS. Standard curves to quantitate the levels of secreted cytokines. Data were analyzed with ForeCyt software.

TABLE 8

| | | | | | % Tumor cell death | | % CD25 +ve Live T-cells | |
|---|---|---|---|---|---|---|---|---|
| Construct | Protein | Domains present | | | nM | Max. | nM | Max. |
| number | Format | TAA | CD3 | CD8 | EC₅₀ | Activity | EC₅₀ | Activity |
| Control | | | | | 0.08 | 57.63 | 0.18 | 71.83 |
| 1 | 1 | BCMA | LA | P | 0.44 | 73.94 | 0.8 | 72.85 |
| 13 | 2 | BCMA | LA | P | 0.4 | 70.64 | 1.54 | 71.09 |
| 19 | 3 | BCMA | LA | P | 0.08 | 69.59 | 0.4 | 72.25 |
| 4 | 1 | BCMA | LA | A | >10.00 | 50.38 | 6.99 | 54.74 |
| 16 | 2 | BCMA | LA | A | >10.00 | 0.89 | >10.00 | 3.88 |
| 22 | 3 | BCMA | LA | A | 7.42 | 52.49 | 5.02 | 56.05 |
| 3 | 1 | BCMA | A | P | >10.00 | −0.31 | >10.00 | 4.18 |
| 15 | 2 | BCMA | A | P | >10.00 | 1.18 | >10.00 | 4.33 |
| 21 | 3 | BCMA | A | P | >10.00 | 10.21 | >10.00 | 17.4 |
| 6 | 1 | BCMA | A | A | >10.00 | −1.25 | >10.00 | 4.39 |
| 18 | 2 | BCMA | A | A | >10.00 | −0.25 | >10.00 | 3.78 |
| 24 | 3 | BCMA | A | A | >10.00 | 0.96 | >10.00 | 3.74 |
| 7 | 1 | none | LA | P | >10.00 | 19.52 | 3.92 | 33.77 |
| 34 | 2 | none | LA | P | >10.00 | 15.57 | >10.00 | 21.75 |
| 25 | 3 | none | LA | P | >10.00 | 7.24 | >10.00 | 13.07 |
| 10 | 1 | none | LA | A | >10.00 | −0.04 | >10.00 | 4.35 |
| 31 | 2 | none | LA | A | >10.00 | 3.96 | >10.00 | 3.25 |
| 28 | 3 | none | LA | A | >10.00 | 1.09 | >10.00 | 4.48 |
| 2 | 1 | BCMA | HA | P | 0.04 | 72.26 | 0.09 | 80.34 |
| 14 | 2 | BCMA | HA | P | 0.02 | 74.38 | 0.19 | 84.94 |
| 20 | 3 | BCMA | HA | P | 0.02 | 71.62 | 0.11 | 81.04 |
| 5 | 1 | BCMA | HA | A | 0.58 | 68.37 | 0.64 | 66.49 |
| 17 | 2 | BCMA | HA | A | 0.84 | 59.12 | 1.16 | 68.07 |
| 23 | 3 | BCMA | HA | A | 0.89 | 65.04 | 1.03 | 64.55 |
| 8 | 1 | none | HA | P | 3.22 | 22.71 | 0.17 | 44.81 |
| 35 | 2 | none | HA | P | 5.76 | 29.18 | 0.77 | 48.62 |
| 26 | 3 | none | HA | P | >10.00 | 6.45 | >10.00 | 22.41 |
| 11 | 1 | none | HA | A | >10.00 | 8.93 | >10.00 | 16.37 |
| 32 | 2 | none | HA | A | >10.00 | 1.47 | >10.00 | 4.51 |
| 29 | 3 | none | HA | A | >10.00 | 0.24 | >10.00 | 4.07 |
| 9 | 1 | none | A | P | >10.00 | −0.54 | >10.00 | 4.38 |
| 36 | 2 | none | A | P | >10.00 | 14.79 | >10.00 | 13.6 |
| 27 | 3 | none | A | P | >10.00 | 0.84 | >10.00 | 4.03 |
| 12 | 1 | none | A | A | >10.00 | 12.1 | >10.00 | 16.4 |
| 33 | 2 | none | A | A | >10.00 | −0.55 | >10.00 | 3.02 |
| 30 | 3 | none | A | A | >10.00 | 0.92 | >10.00 | 4.76 |
| Positive | | | | | 0.08 | 57.6 | 0.18 | 71.8 |
| control | | | | | | | | |
| Negative | | | | | >10.00 | 6.8 | >10.00 | 4.47 |
| control | | | | | | | | |
| (HC3B1.007) | | | | | | | | |

LA: low affinity (high K_{D});
HA: high affinity (low K_{D}),
A: absent;
P: present

TABLE 9

| | | | | | % Tumor cell death | | % CD25 +ve Live T-cells | |
|---|---|---|---|---|---|---|---|---|
| Construct | Protein | Domains present | | | nM | Max. | nM | Max. |
| number | format | TAA | CD3 | CD8 | EC50 | Activity | EC50 | Activity |
| P4 | 1 | PSMA | LA | P | 1.9 | 67.7 | 9.2 | 70.6 |
| P7 | 2 | PSMA | LA | P | 0.7 | 80.1 | 2.5 | 68.2 |
| P2 | 3 | PSMA | LA | P | 0.9 | 73.8 | 2.9 | 26.8 |
| P16 | 1 | PSMA | LA | A | >10.00 | 6.7 | >10.00 | 3.3 |
| P12 | 2 | PSMA | LA | A | >10.00 | 3.8 | >10.00 | 2.8 |
| P11 | 3 | PSMA | LA | A | >10.00 | 9.8 | >10.00 | 3.2 |
| P5 | 1 | PSMA | A | P | >10.00 | 4.7 | >10.00 | 3.9 |
| P8 | 2 | PSMA | A | P | >10.00 | 9.8 | >10.00 | 4.8 |
| P9 | 3 | PSMA | A | P | >10.00 | 13.7 | >10.00 | 3.3 |
| P17 | 1 | PSMA | A | A | >10.00 | 7.5 | >10.00 | 5.1 |
| P14 | 2 | PSMA | A | A | >10.00 | 4.7 | >10.00 | 3.8 |
| P18 | 3 | PSMA | A | A | >10.00 | 7.9 | >10.00 | 3.5 |
| P22 | 1 | none | LA | P | >10.00 | 8.9 | >10.00 | 25.4 |
| P25 | 2 | none | LA | P | >10.00 | 67.9 | >10.00 | 45.7 |
| P20 | 3 | none | LA | P | >10.00 | 9.9 | >10.00 | 3.8 |
| P34 | 1 | none | LA | A | >10.00 | 9.4 | >10.00 | 3.7 |
| P30 | 2 | none | LA | A | >10.00 | 9.5 | >10.00 | 6.3 |
| P29 | 3 | none | LA | A | >10.00 | 7.9 | >10.00 | 3.3 |
| P3 | 1 | PSMA | HA | P | 0.2 | 72.4 | 0.3 | 82.1 |
| P6 | 2 | PSMA | HA | P | 0.03 | 83.1 | 0.3 | 76.7 |
| P1 | 3 | PSMA | HA | P | 0.6 | 84.6 | >10.00 | 47.5 |
| P15 | 1 | PSMA | HA | A | >10.00 | 14.5 | 6.6 | 15.2 |
| P13 | 2 | PSMA | HA | A | >10.00 | 79.1 | >10.00 | 19.0 |
| P10 | 3 | PSMA | HA | A | >10.00 | 14.2 | >10.00 | 5.3 |
| P21 | 1 | none | HA | P | 0.2 | 67.5 | 0.2 | 60.2 |
| P24 | 2 | none | HA | P | 1.5 | 59.7 | 1.9 | 64.7 |
| P19 | 3 | none | HA | P | >10.00 | 7.6 | >10.00 | 4.7 |
| P33 | 1 | none | HA | A | >10.00 | 8.6 | >10.00 | 3.1 |
| P31 | 2 | none | HA | A | >10.00 | 13.5 | >10.00 | 7.9 |
| P28 | 3 | none | HA | A | >10.00 | 5.2 | >10.00 | 2.8 |
| P23 | 1 | none | A | P | >10.00 | 5.4 | >10.00 | 3.1 |
| P26 | 2 | none | A | P | >10.00 | 14.3 | >10.00 | 3.7 |
| P27 | 3 | none | A | P | >10.00 | 7.0 | >10.00 | 3.2 |
| P35 | 1 | none | A | A | >10.00 | 2.8 | >10.00 | 4.7 |
| P32 | 2 | none | A | A | >10.00 | 6.1 | >10.00 | 2.9 |
| P36 | 3 | none | A | A | >10.00 | 7.7 | 0.4 | 7.7 |
| Positive | | | | | 0.6 | 80.2 | 1.2 | 75.1 |
| control | | | | | | | | |
| Negative | | | | | >10.00 | 14.5 | >10.00 | 3.5 |
| control | | | | | | | | |

LA: low affinity (high K_{D});
HA: high affinity (low K_{D}),
A: absent;
P: present

TABLE 10

| Construct | Protein | Domains present | | | | | | |
|---|---|---|---|---|---|---|---|---|
| number | Format | TAA | CD3 | CD8 | IFNγ | IL-1b | IL-2 | IL-4 |
| 1 | 1 | BCMA | LA | P | 1.049 | 0.986 | 10.000 | 1.056 |
| 13 | 2 | BCMA | LA | P | 0.834 | 10.000 | 1.244 | 10.000 |
| 19 | 3 | BCMA | LA | P | 0.195 | 10.000 | 10.000 | 0.354 |
| 4 | 1 | BCMA | LA | A | 10.000 | 10.000 | 10.000 | 10.000 |
| 16 | 2 | BCMA | LA | A | 10.000 | 10.000 | 10.000 | 10.000 |
| 22 | 3 | BCMA | LA | A | 10.000 | 10.000 | 10.000 | 3.158 |
| 3 | 1 | BCMA | A | P | 10.000 | 10.000 | 10.000 | 10.000 |
| 15 | 2 | BCMA | A | P | 10.000 | 10.000 | 10.000 | 3.333 |
| 21 | 3 | BCMA | A | P | 10.000 | 10.000 | 10.000 | 10.000 |
| 6 | 1 | BCMA | A | A | 10.000 | 10.000 | 10.000 | 10.000 |
| 18 | 2 | BCMA | A | A | 10.000 | 10.000 | 10.000 | 10.000 |
| 24 | 3 | BCMA | A | A | 10.000 | 10.000 | 10.000 | 10.000 |
| 7 | 1 | none | LA | P | 10.000 | 10.000 | 10.000 | 10.000 |
| 34 | 2 | none | LA | P | 10.000 | 10.000 | 10.000 | 10.000 |
| 25 | 3 | none | LA | P | 10.000 | 0.001 | 10.000 | 10.000 |
| 10 | 1 | none | LA | A | 10.000 | 10.000 | 10.000 | 10.000 |
| 31 | 2 | none | LA | A | 10.000 | 0.004 | 10.000 | 1.111 |
| 28 | 3 | none | LA | A | 10.000 | 10.000 | 10.000 | 10.000 |
| 2 | 1 | BCMA | HA | P | 0.324 | 0.158 | 6.757 | 0.043 |
| 14 | 2 | BCMA | HA | P | 0.042 | 0.037 | 10.000 | 10.000 |
| 20 | 3 | BCMA | HA | P | 0.060 | 10.000 | 10.000 | 0.000 |
| 5 | 1 | BCMA | HA | A | 0.958 | 4.737 | 2.491 | 0.973 |
| 17 | 2 | BCMA | HA | A | 1.108 | 10.000 | 2.842 | 9.057 |
| 23 | 3 | BCMA | HA | A | 1.697 | 10.000 | 2.659 | 1.114 |
| 8 | 1 | none | HA | P | 10.000 | 10.000 | 10.000 | 0.551 |
| 35 | 2 | none | HA | P | 0.992 | 0.400 | 10.000 | 10.000 |
| 26 | 3 | none | HA | P | 10.000 | 10.000 | 10.000 | 10.000 |
| 11 | 1 | none | HA | A | 10.000 | 10.000 | 10.000 | 10.000 |
| 32 | 2 | none | HA | A | 10.000 | | 10.000 | 10.000 |
| 29 | 3 | none | HA | A | 10.000 | 10.000 | 10.000 | 10.000 |
| 9 | 1 | none | A | P | 10.000 | 10.000 | 10.000 | 10.000 |
| 36 | 2 | none | A | P | 10.000 | 10.000 | 10.000 | 10.000 |
| 27 | 3 | none | A | P | 10.000 | | 10.000 | 10.000 |
| 12 | 1 | none | A | A | 10.000 | 10.000 | 10.000 | 10.000 |
| 33 | 2 | none | A | A | 10.000 | 10.000 | 10.000 | 10.000 |
| 30 | 3 | none | A | A | 10.000 | 10.000 | 10.000 | 10.000 |
| Positive | | | | | 0.248 | 0.002 | 0.374 | 0.129 |
| Control | | | | | | | | |
| HC3B1.007 | | | | | 10.000 | 10.000 | 10.000 | 10.000 |

LA: low affinity (high K_{D});
HA: high affinity (low K_{D}),
A: absent;
P: present

TABLE 11

| Construct | Protein | Domains present | | | | | | | |
|---|---|---|---|---|---|---|---|---|---|
| number | Format | TAA | CD3 | CD8 | IL-6 | IL-8 | IL-10 | IL-13 | TNFα |
| 1 | 1 | BCMA | LA | P | 0.864 | 10.000 | 2.594 | 10.000 | 1.450 |
| 13 | 2 | BCMA | LA | P | 0.649 | 0.416 | 7.071 | 10.000 | 1.585 |
| 19 | 3 | BCMA | LA | P | 0.057 | 0.000 | 1.498 | 10.000 | 1.380 |
| 4 | 1 | BCMA | LA | A | 10.000 | 2.987 | 10.000 | 10.000 | 10.000 |
| 16 | 2 | BCMA | LA | A | 10.000 | 9.776 | 10.000 | 10.000 | 10.000 |
| 22 | 3 | BCMA | LA | A | 10.000 | 4.399 | 10.000 | 10.000 | 10.000 |
| 3 | 1 | BCMA | A | P | 10.000 | 10.000 | 10.000 | 10.000 | 10.000 |
| 15 | 2 | BCMA | A | P | 10.000 | 10.000 | 10.000 | 10.000 | 10.000 |
| 21 | 3 | BCMA | A | P | 10.000 | 10.000 | 10.000 | 10.000 | 10.000 |
| 6 | 1 | BCMA | A | A | 10.000 | 10.000 | 10.000 | 10.000 | 10.000 |
| 18 | 2 | BCMA | A | A | 10.000 | 10.000 | 10.000 | 10.000 | 10.000 |
| 24 | 3 | BCMA | A | A | 10.000 | 10.000 | 10.000 | 10.000 | 10.000 |
| 7 | 1 | none | LA | P | 10.000 | 10.000 | 10.000 | 10.000 | 10.000 |
| 34 | 2 | none | LA | P | 10.000 | 10.000 | 10.000 | 10.000 | 10.000 |
| 25 | 3 | none | LA | P | 10.000 | 10.000 | 10.000 | 10.000 | 10.000 |
| 10 | 1 | none | LA | A | 10.000 | 10.000 | 10.000 | 10.000 | 10.000 |
| 31 | 2 | none | LA | A | 10.000 | 10.000 | 10.000 | 10.000 | 10.000 |
| 28 | 3 | none | LA | A | 10.000 | 10.000 | 10.000 | 10.000 | 10.000 |
| 2 | 1 | BCMA | HA | P | 0.115 | 0.065 | 0.474 | 0.000 | 0.807 |
| 14 | 2 | BCMA | HA | P | 0.041 | 0.739 | 10.000 | 10.000 | 10.000 |
| 20 | 3 | BCMA | HA | P | 0.056 | 0.000 | 1.104 | 0.095 | 0.695 |
| 5 | 1 | BCMA | HA | A | 0.643 | 10.000 | 0.443 | 10.000 | 1.113 |
| 17 | 2 | BCMA | HA | A | 0.773 | 0.672 | 1.089 | 10.000 | 10.000 |
| 23 | 3 | BCMA | HA | A | 1.271 | 0.000 | 1.122 | 10.000 | 1.219 |
| 8 | 1 | none | HA | P | 5.135 | 0.561 | 1.404 | 10.000 | 0.994 |
| 35 | 2 | none | HA | P | 10.000 | 1.070 | 2.992 | 10.000 | 6.925 |
| 26 | 3 | none | HA | P | 10.000 | 10.000 | 10.000 | 10.000 | 10.000 |
| 11 | 1 | none | HA | A | 10.000 | 10.000 | 10.000 | 10.000 | 10.000 |
| 32 | 2 | none | HA | A | 10.000 | 10.000 | 10.000 | 10.000 | 10.000 |
| 29 | 3 | none | HA | A | 10.000 | 10.000 | 10.000 | 10.000 | 10.000 |
| 9 | 1 | none | A | P | 10.000 | 10.000 | 10.000 | 10.000 | 10.000 |
| 36 | 2 | none | A | P | 10.000 | 10.000 | 10.000 | 10.000 | 10.000 |
| 27 | 3 | none | A | P | 10.000 | 10.000 | 10.000 | 10.000 | 10.000 |
| 12 | 1 | none | A | A | 10.000 | 10.000 | 10.000 | 0.008 | 10.000 |
| 33 | 2 | none | A | A | 10.000 | 10.000 | 10.000 | | |
| 30 | 3 | none | A | A | 10.000 | 10.000 | 10.000 | 10.000 | 10.000 |
| Positive | | | | | 0.074 | 0.002 | 0.123 | 0.116 | 0.327 |
| Control | | | | | | | | | |
| Negative | | | | | 10.000 | 10.000 | 10.000 | 10.000 | 10.000 |
| control | | | | | | | | | |
| (HC3B1.007) | | | | | | | | | |

LA: low affinity (high K_{D});
HA: high affinity (low K_{D}),
A: absent;
P: present

TABLE 12

| Construct | Protein | | | | | | | |
|---|---|---|---|---|---|---|---|---|
| number | format | TAA | CD3 | CD8 | IFNγ | IL-1B | IL2 | IL4 |
| P4 | 1 | PSMA | LA | P | 5.672 | 5.350 | 10.000 | 10.000 |
| P7 | 2 | PSMA | LA | P | 4.622 | 1.670 | 10.000 | 10.000 |
| P2 | 3 | PSMA | LA | P | 10.000 | 1.537 | 10.000 | 10.000 |
| P16 | 1 | PSMA | LA | A | 10.000 | 10.000 | 10.000 | 10.000 |
| P12 | 2 | PSMA | LA | A | 10.000 | 10.000 | 10.000 | 0.041 |
| P11 | 3 | PSMA | LA | A | 10.000 | 10.000 | 10.000 | 10.000 |
| P5 | 1 | PSMA | A | P | 10.000 | 10.000 | 10.000 | 10.000 |
| P8 | 2 | PSMA | A | P | 10.000 | 10.000 | 10.000 | 10.000 |
| P9 | 3 | PSMA | A | P | 10.000 | 10.000 | 10.000 | 10.000 |
| P17 | 1 | PSMA | A | A | 10.000 | 10.000 | 10.000 | 0.370 |
| P14 | 2 | PSMA | A | A | 10.000 | 10.000 | 10.000 | 10.000 |
| P18 | 3 | PSMA | A | A | 10.000 | 10.000 | 10.000 | 3.333 |
| P22 | 1 | none | LA | P | 9.984 | 10.000 | 10.000 | 10.000 |
| P25 | 2 | none | LA | P | 8.333 | 9.076 | 10.000 | 10.000 |
| P20 | 3 | none | LA | P | 10.000 | 10.000 | 10.000 | 3.333 |
| P34 | 1 | none | LA | A | 10.000 | 10.000 | 10.000 | 10.000 |
| P30 | 2 | none | LA | A | 10.000 | 10.000 | 10.000 | 0.370 |
| P29 | 3 | none | LA | A | 10.000 | 10.000 | 9.299 | 0.370 |
| P3 | 1 | PSMA | HA | P | 0.489 | 0.267 | 10.000 | 10.000 |
| P6 | 2 | PSMA | HA | P | 0.867 | 0.085 | 10.000 | 10.000 |
| P1 | 3 | PSMA | HA | P | 9.596 | 0.263 | 10.000 | 10.000 |
| P15 | 1 | PSMA | HA | A | 10.000 | 10.000 | 10.000 | 0.370 |
| P13 | 2 | PSMA | HA | A | 10.000 | 10.000 | 10.000 | 10.000 |
| P10 | 3 | PSMA | HA | A | 10.000 | 10.000 | 10.000 | 10.000 |
| P21 | 1 | none | HA | P | 0.316 | 0.285 | 10.000 | 10.000 |
| P24 | 2 | none | HA | P | 8.126 | 5.372 | 10.000 | 10.000 |
| P19 | 3 | none | HA | P | 10.000 | 10.000 | 10.000 | 3.333 |
| P33 | 1 | none | HA | A | 10.000 | 10.000 | 10.000 | 10.000 |
| P31 | 2 | none | HA | A | 1.111 | 10.000 | 0.000 | 0.005 |
| P28 | 3 | none | HA | A | 1.111 | 10.000 | 10.000 | 0.370 |
| P23 | 1 | none | A | P | 10.000 | 10.000 | 10.000 | 10.000 |
| P26 | 2 | none | A | P | 1.111 | 0.001 | 10.000 | 10.000 |
| P27 | 3 | none | A | P | 10.000 | 10.000 | 10.000 | 1.111 |
| P35 | 1 | none | A | A | 10.000 | 10.000 | 10.000 | 10.000 |
| P32 | 2 | none | A | A | 3.333 | 10.000 | 10.000 | 0.370 |
| P36 | 3 | none | A | A | 10.000 | 10.000 | 10.000 | 0.123 |
| Negative | | | | | 10.000 | 10.000 | 10.000 | 10.000 |
| control | | | | | | | | |
| Positive | | | | | 10.000 | 1.104 | 10.000 | 10.000 |
| control | | | | | | | | |

LA: low affinity (high K_{D});
HA: high affinity (low K_{D}),
A: absent;
P: present

TABLE 13

| Construct | Protein | | | | | | | | |
|---|---|---|---|---|---|---|---|---|---|
| number | format | TAA | CD3 | CD8 | IL6 | IL8 | IL10 | IL13 | TNFα |
| P4 | 1 | PSMA | LA | P | 10.000 | 5.061 | 8.295 | 3.861 | 8.710 |
| P7 | 2 | PSMA | LA | P | 0.996 | 0.441 | 5.187 | 1.230 | 8.490 |
| P2 | 3 | PSMA | LA | P | 10.000 | 1.145 | 10.000 | 0.960 | 10.000 |
| P16 | 1 | PSMA | LA | A | 10.000 | 10.000 | 10.000 | 10.000 | 10.000 |
| P12 | 2 | PSMA | LA | A | 10.000 | 10.000 | 10.000 | 10.000 | 10.000 |
| P11 | 3 | PSMA | LA | A | 10.000 | 10.000 | 10.000 | 10.000 | 0.123 |
| P5 | 1 | PSMA | A | P | 10.000 | 10.000 | 10.000 | 10.000 | 10.000 |
| P8 | 2 | PSMA | A | P | 0.002 | 10.000 | 10.000 | 0.002 | 10.000 |
| P9 | 3 | PSMA | A | P | 10.000 | 10.000 | 10.000 | 10.000 | 0.000 |
| P17 | 1 | PSMA | A | A | 3.333 | 10.000 | 10.000 | 10.000 | 3.333 |
| P14 | 2 | PSMA | A | A | 10.000 | 10.000 | 10.000 | 10.000 | 0.123 |
| P18 | 3 | PSMA | A | A | 3.333 | 10.000 | 3.333 | 1.111 | 0.000 |
| P22 | 1 | none | LA | P | 10.000 | 8.820 | 10.000 | 10.000 | 10.000 |
| P25 | 2 | none | LA | P | 10.000 | 3.333 | 8.925 | 10.000 | 10.000 |
| P20 | 3 | none | LA | P | 10.000 | 0.000 | 10.000 | 1.111 | 0.000 |
| P34 | 1 | none | LA | A | 10.000 | 10.000 | 10.000 | 10.000 | 10.000 |
| P30 | 2 | none | LA | A | 10.000 | 10.000 | 10.000 | 0.466 | 10.000 |
| P29 | 3 | none | LA | A | 10.000 | 10.000 | 10.000 | 10.000 | 10.000 |
| P3 | 1 | PSMA | HA | P | 1.151 | 0.000 | 0.502 | 0.000 | 0.700 |
| P6 | 2 | PSMA | HA | P | 0.888 | 0.000 | 2.192 | 0.050 | 1.453 |
| P1 | 3 | PSMA | HA | P | 10.000 | 0.000 | 10.000 | 0.177 | 10.000 |
| P15 | 1 | PSMA | HA | A | 10.000 | 7.143 | 10.000 | 10.000 | 10.000 |
| P13 | 2 | PSMA | HA | A | 10.000 | 3.498 | 10.000 | 10.000 | 10.000 |
| P10 | 3 | PSMA | HA | A | 10.000 | 10.000 | 10.000 | 10.000 | 10.000 |
| P21 | 1 | none | HA | P | 0.373 | 0.030 | 0.385 | 0.260 | 1.395 |
| P24 | 2 | none | HA | P | 10.000 | 1.093 | 10.000 | 1.633 | 10.000 |
| P19 | 3 | none | HA | P | 10.000 | 10.000 | 10.000 | 10.000 | 10.000 |
| P33 | 1 | none | HA | A | 10.000 | 10.000 | 10.000 | 0.000 | 10.000 |
| P31 | 2 | none | HA | A | 3.333 | 0.000 | 3.333 | 10.000 | 10.000 |
| P28 | 3 | none | HA | A | 10.000 | 10.000 | 10.000 | 10.000 | 0.370 |
| P23 | 1 | none | A | P | 10.000 | 10.000 | 10.000 | 10.000 | 10.000 |
| P26 | 2 | none | A | P | 10.000 | 10.000 | 10.000 | 10.000 | 1.111 |
| P27 | 3 | none | A | P | 10.000 | 10.000 | 3.333 | 3.333 | 0.000 |
| P35 | 1 | none | A | A | 10.000 | 10.000 | 10.000 | 10.000 | 10.000 |
| P32 | 2 | none | A | A | 3.333 | 10.000 | 0.370 | 10.000 | 10.000 |
| P36 | 3 | none | A | A | 10.000 | 10.000 | 10.000 | 10.000 | 0.370 |
| Negative | | | | | 10.000 | 3.333 | 10.000 | 4.617 | 10.000 |
| control | | | | | | | | | |
| Positive | | | | | 1.793 | 0.370 | 3.440 | 0.528 | 2.967 |
| control | | | | | | | | | |

LA: low affinity (high K_{D});
HA: high affinity (low K_{D}),
A: absent;
P: present

### Example 3: Low Affinity CD3 Multispecifics Paired with CD8 Binders Show Selective Activation of CD8 T Cells and Reduced Anti-Inflammatory Cytokine Release

[0681] Trispecific PSMA×CD3×CD8 antibodies were constructed as shown in FIG. 4A. Pan T cells were isolated from the peripheral blood mononuclear cells (PBMCs) of healthy volunteers and stained with the test multispecifics at room temperature for 30 min followed by detection using an anti-human IgG antibody and staining with anti-human CD3, CD4 and CD8 antibodies. Binding affinity was determined using the secondary antibody-stained samples as negative controls. As shown in FIG. 4B and Table 14, low affinity CD3 multispecifics paired with CD8 binders show higher selective binding to CD8 T cells compared to the controls.

[0682] Low affinity CD3 multispecifics paired with CD8 binders demonstrated superior effects in cytotoxicity assays on C4-2B cells (target) and PBMCs (effector) (see FIG. 5A and FIG. 5B).

[0683] Low affinity CD3 multispecifics paired with CD8 binders were tested for potent cytotoxicity against target cell lines in a CD8 T cell dependent manner. PBMCs of healthy volunteers were either depleted of CD8 T cells or used as such. CD8 depleted and non depleted PBMCs were cocultured with C4-2B target cells as a 1:1 effector to target ratio (CD3 to target cells) for 72 hrs in the presence of the test multispecifics. Cytotoxicity was monitored using the Incucyte automated live cell analysis system and EC50 values were calculated after normalizing to no multispecific containing wells. As shown in FIG. 6, C4-2B target cells liability is high in the CD8 T cells depletion group indicating that low affinity CD3 multispecifics paired with CD8 binders show potent cytotoxicity against target cell lines in a CD8 T cell dependent manner.

[0684] PBMCs were cocultured with C4-2B target cells as a 1:1 effector to target ratio (CD3 to target cells) for the indicated time points in the presence of the test multispecifics. At each time point, cells were harvested and CD3, CD4 and CD8 T cells were analyzed for the presence of the indicated activation and exhaustion markers. As shown in FIG. 7, results indicate low affinity CD3 multispecifics paired with CD8 binders specifically and potently activate only CD8 T cells.

[0685] PBMCs were cocultured with C4-2B target cells as a 1:1 effector to target ratio (CD3 to target cells) for the indicated time points in the presence of the test multispecifics. At each time point, supernatants were harvested and analyzed for the indicated cytokines using a multiplex Luminex analysis system. The results indicate that low affinity CD3 multispecifics paired with CD8 binders show reduced anti-inflammatory cytokine release (see FIG. 8).

TABLE 14

| Antibody | combination | CD3 arm | Affinity |
|---|---|---|---|
| CD8B573.001 | CD3 × CD8 × PSMA | CD3B450 | Ultra low |
| CD8B574.001 | CD8 × PSMA | NA | |
| CD8B155.003 | CD3 × PSMA | CD3B450 | Ultra low |
| CD8B52 | PSMB410scFv × | CD3B376 | Medium |
| | CD3B376-Fab | | (40-60 nM) |
| VB19 | CD3B220 × PSMB365 | CD3B220 | high |

### Example 4: Production of Antibodies that Bind CD8

[0686] 4.1: Generation CD8α Antibodies, CD8β Antibodies, and CD8αβ Antibodies

[0687] Immunogen. Recombinant human CD8alpha/beta heterodimer protein (cat #9358-CD) was obtained from R&D Systems, Inc. The amino acid sequence of the heterodimeric protein is listed in Table 15.

TABLE 15
Amino acid sequence of recombinant
human CD8α/β heterodimer protein

| | Protein | | SEQ |
|---|---|---|---|
| Name | ID | Sequence | ID NO |
| Recombinant | rhCD8α | SQFRVSPLDRTWNLGETVELK | 2177 |
| human | (Ser22- | CQVLLSNPTSGCSWLFQPRGA | 2322 |
| CD8α/β | Asp182) | AASPTFLLYLSQNKPKAAEGL | |
| heterodimer | Accession | DTQRFSGKRLGDTFVLTLSDF | |
| protein | #P01732 | RRENEGYYFCSALSNSIMYFS | |
| (cat #: | | HFVPVFLPAKPTTTPAPRPPT | |
| 9358-CD) | | PAPTIASQPLSLRPEACRPAA | |
| | | GGAVHTRGLDFACD- | |
| | | [proprietary R&D | |
| | | System acidic tails]- | |
| | | HHHHHH | |
| | rhCD8β | NSVLQQTPAYIKVQTNKMVML | 2178 |
| | (Asn19- | SCEAKISLSNMRIYWLRQRQA | 2323 |
| | Pro170) | PSSDSHHEFLALWDSAKGTIH | |
| | Accession | GEEVEQEKIAVFRDASRFILN | |
| | #P10966 | LTSVKPEDSGIYFCMIVGSPE | |
| | | LTFGKGTQLSVVDFLPTTAQP | |
| | | TKKSTLKKRVCRLPRPETQKG | |
| | | PLCSP-[proprietary | |
| | | R&D System basic | |
| | | tails]-DYKDDDDK | |

[0688] Immunization in wild-type mouse and screening of anti-CD8α antibodies, anti-CD8β antibodies, and anti-CD8αβ antibodies. Wild-type (WT) mice with 6 different MHC combinations was immunized using rapid immunization protocol. Eight mice were selected for cell fusion based on serum titer. Hybridoma supernatants were screening by LUMINEX using the immunogen and human pan-T cells. Hits were V-region recovered and formatted into monoclonal IgG1 antibodies.

[0689] All the monoclonal antibodies were produced as full-length antibodies as human IgG1. Nucleic acid sequences encoding variable regions were subcloned into a custom mammalian expression vectors containing constant region of IgG1 Fc expression cassettes using standard PCR restriction enzyme based cloning techniques. The mAbs were expressed by transient transfection in Chinese hamster ovary cell line. The antibodies were initially purified by MAB SELECT SURE Protein A column (GE healthcare, Piscataway, N.J.) (Brown, Bottomley et al. 1998). The column was equilibrated with Phosphate Buffer Saline (PBS), pH 7.2 and loaded with fermentation supernatant at a flow rate of 2 mL/min. After loading, the column was washed with PBS (4 CV) followed by elution in 30 mM sodium acetate, pH 3.5. Fractions containing protein peaks as monitored by Absorbance at 280 nm in AKTA Explorer (GE healthcare) were pooled together and were neutralized to pH 5.0 by adding 1% of 3 M sodium acetate, pH 9.0. As a polishing step, the antibodies were purified on a preparative size exclusion chromatography (SEC) using a SUPERDEX 200 column (GE healthcare). The integrity of the sample was assessed by endotoxin measurement and SDS polyacrylamide gel electrophoresis under reducing and non-reducing conditions. The intact mass was confirmed by mass spectrometry.

[0690] The VH and VL sequences of certain CD8 antibodies are provided in Table 16. The CDRs sequences of certain CD8 antibodies are provided in Table 17 (Kabat), Table 18 (Chothia), Table 19 (AbM), Table 20 (Contact), and Table 21 (IMGT).

TABLE 16
VH and VL Amino Acid Sequences

| | Protein | HC | LC | VH AA | VL AA | | Light Chain AA |
|---|---|---|---|---|---|---|---|
| # | Name | Isotype | Isotype | sequence | sequence | Heavy Chain AA sequence | sequence |
| 1 | CD8B191 | IgG1 | Kappa | QIQLVQSGPE | DIVLTQSP | QIQLVQSGPELVKPGTSMKMSCKASGYTFTDYYMNW | DIVLTQSPATLSVTPG |
| | | | | LVKPGTSMKM | ATLSVTPG | VKQSHGKSLEWIGRVIPSNGGTIYNLKFKGKATLTV | DRVSLSCRASQSISDF |
| | | | | SCKASGYTFT | DRVSLSCR | DKSLSTAYMQLNSLTSEDSAVYFCAREDYNNQGFFL | LHWYQQKSHESPRLLI |
| | | | | DYYMNWVKQS | ASQSISDF | DAMDYWGQGTSVTVSSASTKGPSVFPLAPSSKSTSG | KYASQSISGIPSRFSG |
| | | | | HGKSLEWIGR | LHWYQQKS | GTAALGCLVKDYFPEPVTVSWNSGALTSGVHTFPAV | SGSGSDFTLTINSVEP |
| | | | | VIPSNGGTIY | HESPRLLI | LQSSGLYSLSSVVTVPSSSLGTQTYICNVNHKPSNT | EDVGVYYCQNGHSFPY |
| | | | | NLKFKGKATL | KYASQSIS | KVDKKVEPKSCDKTHTCPPCPAPELLGGPSVFLFPP | TFGSGTKLEIKRTVAA |
| | | | | TVDKSLSTAY | GIPSRFSG | KPKDTLMISRTPEVTCVVVDVSHEDPEVKFNWYVDG | PSVFIFPPSDEQLKSG |
| | | | | MQLNSLTSED | SGSGSDFT | VEVHNAKTKPREEQYNSTYRVVSVLTVLHQDWLNGK | TASVVCLLNNFYPREA |
| | | | | SAVYFCARED | LTINSVEP | EYKCKVSNKALPAPIEKTISKAKGQPREPQVYTLPP | KVQWKVDNALQSGNSQ |
| | | | | YNNQGFFLDA | EDVGVYYC | SREEMTKNQVSLTCLVKGFYPSDIAVEWESNGQPEN | ESVTEQDSKDSTYSLS |
| | | | | MDYWGQGTSV | QNGHSFPY | NYKTTPPVLDSDGSFFLYSKLTVDKSRWQQGNVFSC | STLTLSKADYEKHKVY |
| | | | | TVSS | TFGSGTKL | SVMHEALHNHYTQKSLSLSPGK | ACEVTHQGLSSPVTKS |
| | | | | | EIK | | FNRGEC |
| | | | | 31 | 32 | 33 | 34 |
| 2 | CD8B226 | IgG1 | Kappa | EFQLQQSGPE | DIVMTQSP | EFQLQQSGPELVKPGASVKMSCKASGYTFTDYYMNW | DIVMTQSPATLSVTPG |
| | | | | LVKPGASVKM | ATLSVTPG | VKQSHGKSLQWIGRIIPSNGATIYNQKFKGKATLTV | DRVSLSCRASQSISHY |
| | | | | SCKASGYTFT | DRVSLSCR | DKSLSTAYMHLNSLTSEDSAVYYCAREDYSNQGFFL | LHWYQQKLHESPRLLI |
| | | | | DYYMNWVKQS | ASQSISHY | DAMDYWGQGTTVTVSSASTKGPSVFPLAPSSKSTSG | KYASQSISGIPSRFSG |
| | | | | HGKSLQWIGR | LHWYQQKL | GTAALGCLVKDYFPEPVTVSWNSGALTSGVHTFPAV | SGSGSDFTLSINSVEP |
| | | | | IIPSNGATIY | HESPRLLI | LQSSGLYSLSSVVTVPSSSLGTQTYICNVNHKPSNT | EDVGVYYCQNGHSFPY |
| | | | | NQKFKGKATL | KYASQSIS | KVDKKVEPKSCDKTHTCPPCPAPELLGGPSVFLFPP | TFGGGTKLEIKRTVAA |
| | | | | TVDKSLSTAY | GIPSRFSG | KPKDTLMISRTPEVTCVVVDVSHEDPEVKFNWYVDG | PSVFIFPPSDEQLKSG |
| | | | | MHLNSLTSED | SGSGSDFT | VEVHNAKTKPREEQYNSTYRVVSVLTVLHQDWLNGK | TASVVCLLNNFYPREA |
| | | | | SAVYYCARED | LSINSVEP | EYKCKVSNKALPAPIEKTISKAKGQPREPQVYTLPP | KVQWKVDNALQSGNSQ |
| | | | | YSNQGFFLDA | EDVGVYYC | SREEMTKNQVSLTCLVKGFYPSDIAVEWESNGQPEN | ESVTEQDSKDSTYSLS |
| | | | | MDYWGQGTTV | QNGHSFPY | NYKTTPPVLDSDGSFFLYSKLTVDKSRWQQGNVFSC | STLTLSKADYEKHKVY |
| | | | | TVSS | TFGGGTKL | SVMHEALHNHYTQKSLSLSPGK | ACEVTHQGLSSPVTKS |
| | | | | | EIK | | FNRGEC |
| | | | | 65 | 66 | 67 | 68 |
| 3 | CD8B259 | IgG1 | Kappa | EVQLQQSGPE | DIVMTQSP | EVQLQQSGPELVKPGASVKMSCKASGYTFTDYYMNW | DIVMTQSPATLSVTPG |
| | | | | LVKPGASVKM | ATLSVTPG | VKQSHGKSLEWIGRVIPSNGGTIYNQKFRGKATLTV | DRVSLSCRASQSISHF |
| | | | | SCKASGYTFT | DRVSLSCR | DKSLSTAYMQLNSLTSEDSAVYYCAREDYGNQGFFL | LHWYQQKSHESPRLLI |
| | | | | DYYMNWVKQS | ASQSISHF | DAMDYWGQGTTVTVSSASTKGPSVFPLAPSSKSTSG | KYASQSISGSPSKFSG |
| | | | | HGKSLEWIGR | LHWYQQKS | GTAALGCLVKDYFPEPVTVSWNSGALTSGVHTFPAV | SGSGSDFTLTINSVEP |
| | | | | VIPSNGGTIY | HESPRLLI | LQSSGLYSLSSVVTVPSSSLGTQTYICNVNHKPSNT | EDVGVYYCQSGHSFPY |
| | | | | NQKFRGKATL | KYASQSIS | KVDKKVEPKSCDKTHTCPPCPAPELLGGPSVFLFPP | TFGSGTKLEIKRTVAA |
| | | | | TVDKSLSTAY | GSPSKFSG | KPKDTLMISRTPEVTCVVVDVSHEDPEVKFNWYVDG | PSVFIFPPSDEQLKSG |
| | | | | MQLNSLTSED | SGSGSDFT | VEVHNAKTKPREEQYNSTYRVVSVLTVLHQDWLNGK | TASVVCLLNNFYPREA |
| | | | | SAVYYCARED | LTINSVEP | EYKCKVSNKALPAPIEKTISKAKGQPREPQVYTLPP | KVQWKVDNALQSGNSQ |
| | | | | YGNQGFFLDA | EDVGVYYC | SREEMTKNQVSLTCLVKGFYPSDIAVEWESNGQPEN | ESVTEQDSKDSTYSLS |
| | | | | MDYWGQGTTV | QSGHSFPY | NYKTTPPVLDSDGSFFLYSKLTVDKSRWQQGNVFSC | STLTLSKADYEKHKVY |
| | | | | TVSS | TFGSGTKL | SVMHEALHNHYTQKSLSLSPGK | ACEVTHQGLSSPVTKS |
| | | | | | EIK | | FNRGEC |
| | | | | 99 | 100 | 101 | 102 |
| 4 | CD8B298 | IgG1 | Kappa | QVQLQQSGPE | DIVMTQSP | QVQLQQSGPELVKPGASVKMSCKASGYTFTDYYMNW | DIVMTQSPATLSVTPG |
| | | | | LVKPGASVKM | ATLSVTPG | VKQSHGKSLEWIGRVIPNNGGTRYNQKFKGKATLTV | DRVSLSCRASQTISDY |
| | | | | SCKASGYTFT | DRVSLSCR | DKSLSTAYMQLNSLTSEDSAVYYCAREDFSNQGFFL | LHWYQQKSHESPRLLI |
| | | | | DYYMNWVKQS | ASQTISDY | DAMDYWGQGTSVTVSSASTKGPSVFPLAPSSKSTSG | KYASQSISGIPSRFSG |
| | | | | HGKSLEWIGR | LHWYQQKS | GTAALGCLVKDYFPEPVTVSWNSGALTSGVHTFPAV | SGSGSDFTLSINSVEP |
| | | | | VIPNNGGTRY | HESPRLLI | LQSSGLYSLSSVVTVPSSSLGTQTYICNVNHKPSNT | EDVGVYYCQNGHSFPY |
| | | | | NQKFKGKATL | KYASQSIS | KVDKKVEPKSCDKTHTCPPCPAPELLGGPSVFLFPP | TFGAGTKLELKRTVAA |
| | | | | TVDKSLSTAY | GIPSRFSG | KPKDTLMISRTPEVTCVVVDVSHEDPEVKFNWYVDG | PSVFIFPPSDEQLKSG |
| | | | | MQLNSLTSED | SGSGSDFT | VEVHNAKTKPREEQYNSTYRVVSVLTVLHQDWLNGK | TASVVCLLNNFYPREA |
| | | | | SAVYYCARED | LSINSVEP | EYKCKVSNKALPAPIEKTISKAKGQPREPQVYTLPP | KVQWKVDNALQSGNSQ |
| | | | | FSNQGFFLDA | EDVGVYYC | SREEMTKNQVSLTCLVKGFYPSDIAVEWESNGQPEN | ESVTEQDSKDSTYSLS |
| | | | | MDYWGQGTSV | QNGHSFPY | NYKTTPPVLDSDGSFFLYSKLTVDKSRWQQGNVFSC | STLTLSKADYEKHKVY |
| | | | | TVSS | TFGAGTKL | SVMHEALHNHYTQKSLSLSPGK | ACEVTHQGLSSPVTKS |
| | | | | | ELK | | FNRGEC |
| | | | | 133 | 134 | 135 | 136 |
| 5 | CD8B342 | IgG1 | Kappa | EFQLQQSGPE | DIVMTQTP | EFQLQQSGPELVKPGASVKVSCKASGYTFTDYYVNW | DIVMTQTPATLSVTPG |
| | | | | LVKPGASVKV | ATLSVTPG | VQQSHGKSLEWIGRVIPNNGNVIYNQNFKGKATLTV | DRVSLSCRASQTISNY |
| | | | | SCKASGYTFT | DRVSLSCR | DKSLSSAYLQLNSLTSEDSAVYYCTREDYSNQGFFL | LHWYQQKSHESPRLLI |
| | | | | DYYVNWVQQS | ASQTISNY | DAMDYWGQGTSVTVSSASTKGPSVFPLAPSSKSTSG | KYASQSISGIPSRFSG |
| | | | | HGKSLEWIGR | LHWYQQKS | GTAALGCLVKDYFPEPVTVSWNSGALTSGVHTFPAV | SGSGSDFTLSINSVEP |
| | | | | VIPNNGNVIY | HESPRLLI | LQSSGLYSLSSVVTVPSSSLGTQTYICNVNHKPSNT | EDVGVYYCQNGHSFPY |
| | | | | NQNFKGKATL | KYASQSIS | KVDKKVEPKSCDKTHTCPPCPAPELLGGPSVFLFPP | TFGGGTKLEIKRTVAA |
| | | | | TVDKSLSSAY | GIPSRFSG | KPKDTLMISRTPEVTCVVVDVSHEDPEVKFNWYVDG | PSVFIFPPSDEQLKSG |
| | | | | LQLNSLTSED | SGSGSDFT | VEVHNAKTKPREEQYNSTYRVVSVLTVLHQDWLNGK | TASVVCLLNNFYPREA |
| | | | | SAVYYCTRED | LSINSVEP | EYKCKVSNKALPAPIEKTISKAKGQPREPQVYTLPP | KVQWKVDNALQSGNSQ |
| | | | | YSNQGFFLDA | EDVGVYYC | SREEMTKNQVSLTCLVKGFYPSDIAVEWESNGQPEN | ESVTEQDSKDSTYSLS |
| | | | | MDYWGQGTSV | QNGHSFPY | NYKTTPPVLDSDGSFFLYSKLTVDKSRWQQGNVFSC | STLTLSKADYEKHKVY |
| | | | | TVSS | TFGGGTKL | SVMHEALHNHYTQKSLSLSPGK | ACEVTHQGLSSPVTKS |
| | | | | | EIK | | FNRGEC |
| | | | | 167 | 168 | 169 | 170 |
| 6 | CD8B364 | IgG1 | Kappa | QVQLQQPGAE | DIVLTQSP | QVQLQQPGAELVKPGASVKLSCKASGYTFTSYWMHW | DIVLTQSPASLSVATG |
| | | | | LVKPGASVKL | ASLSVATG | VNRRPGQGLEWIGEINPSNGDSYYNEKFKRKATLTV | EKVTIRCITSTDIDDD |
| | | | | SCKASGYTFT | EKVTIRCI | DISSSTAYMQLSSLTSEDSAVYYCTRSMYYDGRAGA | MNWYQQKPGEPPKLLI |
| | | | | SYWMHWVNRR | TSTDIDDD | YWGQGTTVTVSSASTKGPSVFPLAPSSKSTSGGTAA | SEGNTLRPGVPSRFSS |
| | | | | PGQGLEWIGE | MNWYQQKP | LGCLVKDYFPEPVTVSWNSGALTSGVHTFPAVLQSS | SGYGTDFVFTIENTLS |
| | | | | INPSNGDSYY | GEPPKLLI | GLYSLSSVVTVPSSSLGTQTYICNVNHKPSNTKVDK | EDVADYYCLQSDNMPL |
| | | | | NEKFKRKATL | SEGNTLRP | KVEPKSCDKTHTCPPCPAPELLGGPSVFLFPPKPKD | TFGAGTKLELKRTVAA |
| | | | | TVDISSSTAY | GVPSRFSS | TLMISRTPEVTCVVVDVSHEDPEVKFNWYVDGVEVH | PSVFIFPPSDEQLKSG |
| | | | | MQLSSLTSED | SGYGTDFV | NAKTKPREEQYNSTYRVVSVLTVLHQDWLNGKEYKC | TASVVCLLNNFYPREA |
| | | | | SAVYYCTRSM | FTIENTLS | KVSNKALPAPIEKTISKAKGQPREPQVYTLPPSREE | KVQWKVDNALQSGNSQ |
| | | | | YYDGRAGAYW | EDVADYYC | MTKNQVSLTCLVKGFYPSDIAVEWESNGQPENNYKT | ESVTEQDSKDSTYSLS |
| | | | | GQGTTVTVSS | LQSDNMPL | TPPVLDSDGSFFLYSKLTVDKSRWQQGNVFSCSVMH | STLTLSKADYEKHKVY |
| | | | | | TFGAGTKL | EALHNHYTQKSLSLSPGK | ACEVTHQGLSSPVTKS |
| | | | | | ELK | | FNRGEC |
| | | | | 201 | 202 | 203 | 204 |
| 7 | CD8B200 | IgG1 | Kappa | EVQLQQSGAE | DIQMTQTT | EVQLQQSGAELVKPGASVKLSCKASGYTFTNYWIHW | DIQMTQTTSSLSASLG |
| | | | | LVKPGASVKL | SSLSASLG | VKQRPGQGLEWIGNIDPSDSETHYNQKFKDKATLTV | DRVTITCRASQDISPY |
| | | | | SCKASGYTFT | DRVTITCR | DKSSSTAYMQLISLTSEDSAVYYCASGLTGTGYYWG | LNWYQQKPEGTIKLLI |
| | | | | NYWIHWVKQR | ASQDISPY | QGTTLTVSSASTKGPSVFPLAPSSKSTSGGTAALGC | YYTSKLHSGVPSRFSG |
| | | | | PGQGLEWIGN | LNWYQQKP | LVKDYFPEPVTVSWNSGALTSGVHTFPAVLQSSGLY | SGSGTDYSLTISNLEQ |
| | | | | IDPSDSETHY | EGTIKLLI | SLSSVVTVPSSSLGTQTYICNVNHKPSNTKVDKKVE | EDIATYFCQQDNTLPY |
| | | | | NQKFKDKATL | YYTSKLHS | PKSCDKTHTCPPCPAPELLGGPSVFLFPPKPKDTLM | TFGSGTKLELKRTVAA |
| | | | | TVDKSSSTAY | GVPSRFSG | ISRTPEVTCVVVDVSHEDPEVKFNWYVDGVEVHNAK | PSVFIFPPSDEQLKSG |
| | | | | MQLISLTSED | SGSGTDYS | TKPREEQYNSTYRVVSVLTVLHQDWLNGKEYKCKVS | TASVVCLLNNFYPREA |
| | | | | SAVYYCASGL | LTISNLEQ | NKALPAPIEKTISKAKGQPREPQVYTLPPSREEMTK | KVQWKVDNALQSGNSQ |
| | | | | TGTGYYWGQG | EDIATYFC | NQVSLTCLVKGFYPSDIAVEWESNGQPENNYKTTPP | ESVTEQDSKDSTYSLS |
| | | | | TTLTVSS | QQDNTLPY | VLDSDGSFFLYSKLTVDKSRWQQGNVFSCSVMHEAL | STLTLSKADYEKHKVY |
| | | | | | TFGSGTKL | HNHYTQKSLSLSPGK | ACEVTHQGLSSPVTKS |
| | | | | | ELK | | FNRGEC |
| | | | | 235 | 236 | 237 | 238 |
| 8 | CD8B247 | IgG1 | Kappa | EVQLQQSGPE | DIVMTQSP | EVQLQQSGPELVKPGASVKMSCKASGYTFTDYYMNW | DIVMTQSPATLSVTPG |
| | | | | LVKPGASVKM | ATLSVTPG | VKQSHGKSLEWIGRVIPNNGGTIYNQKFKDKATLTV | ERVSLSCRASQTISHF |
| | | | | SCKASGYTFT | ERVSLSCR | DKSLSTAYMQLNSLTSEDSAVYYCAREDYSNQGFFL | LHWYQQKSHESPRLLI |
| | | | | DYYMNWVKQS | ASQTISHF | DAMDYWGQGTSVTVSSASTKGPSVFPLAPSSKSTSG | KYASQSISGIPSRFSG |
| | | | | HGKSLEWIGR | LHWYQQKS | GTAALGCLVKDYFPEPVTVSWNSGALTSGVHTFPAV | GGSGSDFILTINSVEP |
| | | | | VIPNNGGTIY | HESPRLLI | LQSSGLYSLSSVVTVPSSSLGTQTYICNVNHKPSNT | EDVGMYYCQSGHSFPY |
| | | | | NQKFKDKATL | KYASQSIS | KVDKKVEPKSCDKTHTCPPCPAPELLGGPSVFLFPP | TFGSGTKLEIKRTVAA |
| | | | | TVDKSLSTAY | GIPSRFSG | KPKDTLMISRTPEVTCVVVDVSHEDPEVKFNWYVDG | PSVFIFPPSDEQLKSG |
| | | | | MQLNSLTSED | GGSGSDFI | VEVHNAKTKPREEQYNSTYRVVSVLTVLHQDWLNGK | TASVVCLLNNFYPREA |
| | | | | SAVYYCARED | LTINSVEP | EYKCKVSNKALPAPIEKTISKAKGQPREPQVYTLPP | KVQWKVDNALQSGNSQ |
| | | | | YSNQGFFLDA | EDVGMYYC | SREEMTKNQVSLTCLVKGFYPSDIAVEWESNGQPEN | ESVTEQDSKDSTYSLS |
| | | | | MDYWGQGTSV | QSGHSFPY | NYKTTPPVLDSDGSFFLYSKLTVDKSRWQQGNVFSC | STLTLSKADYEKHKVY |
| | | | | TVSS | TFGSGTKL | SVMHEALHNHYTQKSLSLSPGK | ACEVTHQGLSSPVTKS |
| | | | | | EIK | | FNRGEC |
| | | | | 269 | 270 | 271 | 272 |
| 9 | CD8B265 | IgG1 | Kappa | QVQLQQSGPE | DIVMTQSP | QVQLQQSGPELVKPGASVKMSCKASGYSFTDYYMNW | DIVMTQSPATLSVTPG |
| | | | | LVKPGASVKM | ATLSVTPG | VKQSHGQSLEWIGRVIPRNGATTYNQNFRGKATLTV | DRVSLSCRASQSISHY |
| | | | | SCKASGYSFT | DRVSLSCR | DISLRTAYMHLNSLTSDDSAVYYCAREDFSNQGFFL | LHWYQQKSHESPRLLI |
| | | | | DYYMNWVKQS | ASQSISHY | DAMDYWGQGTSVTVSSASTKGPSVFPLAPSSKSTSG | KYASQSISGIPSRFSG |
| | | | | HGQSLEWIGR | LHWYQQKS | GTAALGCLVKDYFPEPVTVSWNSGALTSGVHTFPAV | SGSGSDFTLSINSVEP |
| | | | | VIPRNGATTY | HESPRLLI | LQSSGLYSLSSVVTVPSSSLGTQTYICNVNHKPSNT | EDVGVYYCQNGHSFPY |
| | | | | NQNFRGKATL | KYASQSIS | KVDKKVEPKSCDKTHTCPPCPAPELLGGPSVFLFPP | TFGSGTKLEMKRTVAA |
| | | | | TVDISLRTAY | GIPSRFSG | KPKDTLMISRTPEVTCVVVDVSHEDPEVKFNWYVDG | PSVFIFPPSDEQLKSG |
| | | | | MHLNSLTSDD | SGSGSDFT | VEVHNAKTKPREEQYNSTYRVVSVLTVLHQDWLNGK | TASVVCLLNNFYPREA |
| | | | | SAVYYCARED | LSINSVEP | EYKCKVSNKALPAPIEKTISKAKGQPREPQVYTLPP | KVQWKVDNALQSGNSQ |
| | | | | FSNQGFFLDA | EDVGVYYC | SREEMTKNQVSLTCLVKGFYPSDIAVEWESNGQPEN | ESVTEQDSKDSTYSLS |
| | | | | MDYWGQGTSV | QNGHSFPY | NYKTTPPVLDSDGSFFLYSKLTVDKSRWQQGNVFSC | STLTLSKADYEKHKVY |
| | | | | TVSS | TFGSGTKL | SVMHEALHNHYTQKSLSLSPGK | ACEVTHQGLSSPVTKS |
| | | | | | EMK | | FNRGEC |
| | | | | 303 | 304 | 305 | 306 |
| 10 | CD8B270 | IgG1 | Kappa | QVQLQQPGAE | DIQMTQTT | QVQLQQPGAELVKPGASVMLSCKASGYTFTNYWMHW | DIQMTQTTSSLSASLG |
| | | | | LVKPGASVML | SSLSASLG | VKQRPGQGLEWIGNIDPSDSETHYNQKFKDKATLTV | DRVTITCRASQDIRPY |
| | | | | SCKASGYTFT | DRVTITCR | DKSSSTAYMQLSSLTSEDSAVYYCASGLTGTGYYWG | LNWYQQKPEGTIKLLI |
| | | | | NYWMHWVKQR | ASQDIRPY | QGTTLTVSSASTKGPSVFPLAPSSKSTSGGTAALGC | YFTSKLHSGVPSRFSG |
| | | | | PGQGLEWIGN | LNWYQQKP | LVKDYFPEPVTVSWNSGALTSGVHTFPAVLQSSGLY | SGSGTDYSLTISNLEQ |
| | | | | IDPSDSETHY | EGTIKLLI | SLSSVVTVPSSSLGTQTYICNVNHKPSNTKVDKKVE | EDIATYFCQQDNTLPY |
| | | | | NQKFKDKATL | YFTSKLHS | PKSCDKTHTCPPCPAPELLGGPSVFLFPPKPKDTLM | TFGSGTKLELKRTVAA |
| | | | | TVDKSSSTAY | GVPSRFSG | ISRTPEVTCVVVDVSHEDPEVKFNWYVDGVEVHNAK | PSVFIFPPSDEQLKSG |
| | | | | MQLSSLTSED | SGSGTDYS | TKPREEQYNSTYRVVSVLTVLHQDWLNGKEYKCKVS | TASVVCLLNNFYPREA |
| | | | | SAVYYCASGL | LTISNLEQ | NKALPAPIEKTISKAKGQPREPQVYTLPPSREEMTK | KVQWKVDNALQSGNSQ |
| | | | | TGTGYYWGQG | EDIATYFC | NQVSLTCLVKGFYPSDIAVEWESNGQPENNYKTTPP | ESVTEQDSKDSTYSLS |
| | | | | TTLTVSS | QQDNTLPY | VLDSDGSFFLYSKLTVDKSRWQQGNVFSCSVMHEAL | STLTLSKADYEKHKVY |
| | | | | | TFGSGTKL | HNHYTQKSLSLSPGK | ACEVTHQGLSSPVTKS |
| | | | | | ELK | | FNRGEC |
| | | | | 337 | 338 | 339 | 340 |
| 11 | CD8B213 | IgG1 | Kappa | EVQLQQSGPE | DIVLTQSQ | EVQLQQSGPELVKPGDSMKMSCKASGYIFTDYYMDW | DIVLTQSQKFMSTSVG |
| | | | | LVKPGDSMKM | KFMSTSVG | VKQSHGKSLEWIGYIYPNNGITSYNQKFKGRATLTI | DRVSVTCKASQNVDKY |
| | | | | SCKASGYIFT | DRVSVTCK | DKSSSTAYMELHSLTSEDSAVYYCARSIYYDHGGGF | VAWYQQKPGQSPKALI |
| | | | | DYYMDWVKQS | ASQNVDKY | PYWGQGTSVTVSSASTKGPSVFPLAPSSKSTSGGTA | YSASYRYSGVPDRFTG |
| | | | | HGKSLEWIGY | VAWYQQKP | ALGCLVKDYFPEPVTVSWNSGALTSGVHTFPAVLQS | SGSGTDFTLTISNVQS |
| | | | | IYPNNGITSY | GQSPKALI | SGLYSLSSVVTVPSSSLGTQTYICNVNHKPSNTKVD | EDLAEYFCQQYNTYPS |
| | | | | NQKFKGRATL | YSASYRYS | KKVEPKSCDKTHTCPPCPAPELLGGPSVFLFPPKPK | FGSGTKLEMKRTVAAP |
| | | | | TIDKSSSTAY | GVPDRFTG | DTLMISRTPEVTCVVVDVSHEDPEVKFNWYVDGVEV | SVFIFPPSDEQLKSGT |
| | | | | MELHSLTSED | SGSGTDFT | HNAKTKPREEQYNSTYRVVSVLTVLHQDWLNGKEYK | ASVVCLLNNFYPREAK |
| | | | | SAVYYCARSI | LTISNVQS | CKVSNKALPAPIEKTISKAKGQPREPQVYTLPPSRE | VQWKVDNALQSGNSQE |
| | | | | YYDHGGGFPY | EDLAEYFC | EMTKNQVSLTCLVKGFYPSDIAVEWESNGQPENNYK | SVTEQDSKDSTYSLSS |
| | | | | WGQGTSVTVS | QQYNTYPS | TTPPVLDSDGSFFLYSKLTVDKSRWQQGNVFSCSVM | TLTLSKADYEKHKVYA |
| | | | | S | FGSGTKLE | HEALHNHYTQKSLSLSPGK | CEVTHQGLSSPVTKSF |
| | | | | | MK | | NRGEC |
| | | | | 371 | 372 | 373 | 374 |
| 12 | CD8B240 | IgG1 | Kappa | QVQLQQSGPE | DIVMTQSP | QVQLQQSGPELVKPGTSVKMSCKASGYTFTDYYMNW | DIVMTQSPATLSVTPG |
| | | | | LVKPGTSVKM | ATLSVTPG | VKQSHGKSLEWIGRVIPSNGGTIYNLKFKGKATLTV | DRVSLSCRASQSISDF |
| | | | | SCKASGYTFT | DRVSLSCR | DKSLSTAYMQLNSLTSEDSAVYFCAREDYNNQGFFL | LHWYQQKSHESPRLLI |
| | | | | DYYMNWVKQS | ASQSISDF | DAMDYWGQGTLVTVSAASTKGPSVFPLAPSSKSTSG | KYASQSISGIPSRFSG |
| | | | | HGKSLEWIGR | LHWYQQKS | GTAALGCLVKDYFPEPVTVSWNSGALTSGVHTFPAV | SGSGSDFTLTINSVEP |
| | | | | VIPSNGGTIY | HESPRLLI | LQSSGLYSLSSVVTVPSSSLGTQTYICNVNHKPSNT | EDVGVYYCQNGHSFPY |
| | | | | NLKFKGKATL | KYASQSIS | KVDKKVEPKSCDKTHTCPPCPAPELLGGPSVFLFPP | TFGSGTKLEIKRTVAA |
| | | | | TVDKSLSTAY | GIPSRFSG | KPKDTLMISRTPEVTCVVVDVSHEDPEVKFNWYVDG | PSVFIFPPSDEQLKSG |
| | | | | MQLNSLTSED | SGSGSDFT | VEVHNAKTKPREEQYNSTYRVVSVLTVLHQDWLNGK | TASVVCLLNNFYPREA |
| | | | | SAVYFCARED | LTINSVEP | EYKCKVSNKALPAPIEKTISKAKGQPREPQVYTLPP | KVQWKVDNALQSGNSQ |
| | | | | YNNQGFFLDA | EDVGVYYC | SREEMTKNQVSLTCLVKGFYPSDIAVEWESNGQPEN | ESVTEQDSKDSTYSLS |
| | | | | MDYWGQGTLV | QNGHSFPY | NYKTTPPVLDSDGSFFLYSKLTVDKSRWQQGNVFSC | STLTLSKADYEKHKVY |
| | | | | TVSA | TFGSGTKL | SVMHEALHNHYTQKSLSLSPGK | ACEVTHQGLSSPVTKS |
| | | | | | EIK | | FNRGEC |
| | | | | 405 | 406 | 407 | 408 |
| 13 | CD8B361 | IgG1 | Kappa | EVQLQQSGPE | DIVMTQSQ | EVQLQQSGPELVKPGNSVKMSCKASGYTFTDYYMDW | DIVMTQSQKFMSTSVG |
| | | | | LVKPGNSVKM | KFMSTSVG | VKQSHGTSLEWIGYIYPNNGDTRYNQKFKDKATLTV | DRVSVTCKASQNVGTY |
| | | | | SCKASGYTFT | DRVSVTCK | DKSSSTAYMELHSLTSEDSAVFYCARSIYYDHGGGF | VAWYQQKPGQSPKALI |
| | | | | DYYMDWVKQS | ASQNVGTY | PYWGQGTLVTVSAASTKGPSVFPLAPSSKSTSGGTA | YSASYRYSGVPDRFTG |
| | | | | HGTSLEWIGY | VAWYQQKP | ALGCLVKDYFPEPVTVSWNSGALTSGVHTFPAVLQS | SGSGTDFTLTINNVQS |
| | | | | IYPNNGDTRY | GQSPKALI | SGLYSLSSVVTVPSSSLGTQTYICNVNHKPSNTKVD | EDLAEYLCQQYNSYPT |
| | | | | NQKFKDKATL | YSASYRYS | KKVEPKSCDKTHTCPPCPAPELLGGPSVFLFPPKPK | FGGGTRLEIKRTVAAP |
| | | | | TVDKSSSTAY | GVPDRFTG | DTLMISRTPEVTCVVVDVSHEDPEVKFNWYVDGVEV | SVFIFPPSDEQLKSGT |
| | | | | MELHSLTSED | SGSGTDFT | HNAKTKPREEQYNSTYRVVSVLTVLHQDWLNGKEYK | ASVVCLLNNFYPREAK |
| | | | | SAVFYCARSI | LTINNVQS | CKVSNKALPAPIEKTISKAKGQPREPQVYTLPPSRE | VQWKVDNALQSGNSQE |
| | | | | YYDHGGGFPY | EDLAEYLC | EMTKNQVSLTCLVKGFYPSDIAVEWESNGQPENNYK | SVTEQDSKDSTYSLSS |
| | | | | WGQGTLVTVS | QQYNSYPT | TTPPVLDSDGSFFLYSKLTVDKSRWQQGNVFSCSVM | TLTLSKADYEKHKVYA |
| | | | | A | FGGGTRLE | HEALHNHYTQKSLSLSPGK | CEVTHQGLSSPVTKSF |
| | | | | | IK | | NRGEC |
| | | | | 439 | 440 | 441 | 442 |
| 14 | CD8B246 | IgG1 | Kappa | QVQLKESGPG | DIQMTQTT | QVQLKESGPGILKPSQTLSLTCSFSGFSLSTSGMNV | DIQMTQTTSSLSASLG |
| | | | | ILKPSQTLSL | SSLSASLG | GWIRQPSGKGLEWLAHIWWDDDKYYNPSLKSQLTIS | DRVTISCRASQDIRNY |
| | | | | TCSFSGFSLS | DRVTISCR | KDTSRNQVFLKITSVDTADTATYYCARRGNYGNYEF | LNWYQQKPDGTVKLLI |
| | | | | TSGMNVGWIR | ASQDIRNY | AYWGQGTTLTVSSASTKGPSVFPLAPSSKSTSGGTA | YHTSRLHSGVPSRFSG |
| | | | | QPSGKGLEWL | LNWYQQKP | ALGCLVKDYFPEPVTVSWNSGALTSGVHTFPAVLQS | SGSGTDYSLTISNLEQ |
| | | | | AHIWWDDDKY | DGTVKLLI | SGLYSLSSVVTVPSSSLGTQTYICNVNHKPSNTKVD | EDIATYFCQQGNTLPW |
| | | | | YNPSLKSQLT | YHTSRLHS | KKVEPKSCDKTHTCPPCPAPELLGGPSVFLFPPKPK | TFGAGTKLELKRTVAA |
| | | | | ISKDTSRNQV | GVPSRFSG | DTLMISRTPEVTCVVVDVSHEDPEVKFNWYVDGVEV | PSVFIFPPSDEQLKSG |
| | | | | FLKITSVDTA | SGSGTDYS | HNAKTKPREEQYNSTYRVVSVLTVLHQDWLNGKEYK | TASVVCLLNNFYPREA |
| | | | | DTATYYCARR | LTISNLEQ | CKVSNKALPAPIEKTISKAKGQPREPQVYTLPPSRE | KVQWKVDNALQSGNSQ |
| | | | | GNYGNYEFAY | EDIATYFC | EMTKNQVSLTCLVKGFYPSDIAVEWESNGQPENNYK | ESVTEQDSKDSTYSLS |
| | | | | WGQGTTLTVS | QQGNTLPW | TTPPVLDSDGSFFLYSKLTVDKSRWQQGNVFSCSVM | STLTLSKADYEKHKVY |
| | | | | S | TFGAGTKL | HEALHNHYTQKSLSLSPGK | ACEVTHQGLSSPVTKS |
| | | | | | ELK | | FNRGEC |
| | | | | 473 | 474 | 475 | 476 |
| 15 | CD8B268 | IgG1 | Kappa | QVQLQQSGAE | DIQMTQSP | QVQLQQSGAELVKPGASVKLSCKASGYTFTVYTIHW | DIQMTQSPASLSASVG |
| | | | | LVKPGASVKL | ASLSASVG | VKQRSGQGLEWIGWFYPGSGNIKYNEKFKDKATLTA | QTVTITCRASGNIHNY |
| | | | | SCKASGYTFT | QTVTITCR | DKSSHTVYMELSRLTSEDSAVYFCARHEDNHYYDGN | LAWFQQKQGKSPQLLV |
| | | | | VYTIHWVKQR | ASGNIHNY | SWFAYWGQGTLVTVSAASTKGPSVFPLAPSSKSTSG | YNAKTLADGVPSRFSG |
| | | | | SGQGLEWIGW | LAWFQQKQ | GTAALGCLVKDYFPEPVTVSWNSGALTSGVHTFPAV | SGSGTQYSLKINSLQT |
| | | | | FYPGSGNIKY | GKSPQLLV | LQSSGLYSLSSVVTVPSSSLGTQTYICNVNHKPSNT | EDFGNYYCQHFWNTPY |
| | | | | NEKFKDKATL | YNAKTLAD | KVDKKVEPKSCDKTHTCPPCPAPELLGGPSVFLFPP | TFGGGTKLEIKRTVAA |
| | | | | TADKSSHTVY | GVPSRFSG | KPKDTLMISRTPEVTCVVVDVSHEDPEVKFNWYVDG | PSVFIFPPSDEQLKSG |
| | | | | MELSRLTSED | SGSGTQYS | VEVHNAKTKPREEQYNSTYRVVSVLTVLHQDWLNGK | TASVVCLLNNFYPREA |
| | | | | SAVYFCARHE | LKINSLQT | EYKCKVSNKALPAPIEKTISKAKGQPREPQVYTLPP | KVQWKVDNALQSGNSQ |
| | | | | DNHYYDGNSW | EDFGNYYC | SREEMTKNQVSLTCLVKGFYPSDIAVEWESNGQPEN | ESVTEQDSKDSTYSLS |
| | | | | FAYWGQGTLV | QHFWNTPY | NYKTTPPVLDSDGSFFLYSKLTVDKSRWQQGNVFSC | STLTLSKADYEKHKVY |
| | | | | TVSA | TFGGGTKL | SVMHEALHNHYTQKSLSLSPGK | ACEVTHQGLSSPVTKS |
| | | | | | EIK | | FNRGEC |
| | | | | 507 | 508 | 509 | 510 |
| 16 | CD8B271 | IgG1 | Kappa | DVQLQESGPG | DIQMTQTT | DVQLQESGPGLVAPSQSLSITCTVSGFSLSIYSIHW | DIQMTQTTSSLSASLG |
| | | | | LVAPSQSLSI | SSLSASLG | VRQPPGKGLEWLGMIWGGGDTDYNSALKSRLSISKD | DRVTISCSASQGISNY |
| | | | | TCTVSGFSLS | DRVTISCS | NSESQVFLKMNSLQTDDTAMYYCARNPHYYGGTYEY | LNWYQQKPDGTVKLLI |
| | | | | IYSIHWVRQP | ASQGISNY | FDVWGTGTTVTVSSASTKGPSVFPLAPSSKSTSGGT | YDTSILYSGVPSRFSG |
| | | | | PGKGLEWLGM | LNWYQQKP | AALGCLVKDYFPEPVTVSWNSGALTSGVHTFPAVLQ | SGSGTDYSLTISNLEP |
| | | | | IWGGGDTDYN | DGTVKLLI | SSGLYSLSSVVTVPSSSLGTQTYICNVNHKPSNTKV | EDVATYYCQQYSNLPY |
| | | | | SALKSRLSIS | YDTSILYS | DKKVEPKSCDKTHTCPPCPAPELLGGPSVFLFPPKP | TFGSGTKLEIKRTVAA |
| | | | | KDNSESQVFL | GVPSRFSG | KDTLMISRTPEVTCVVVDVSHEDPEVKFNWYVDGVE | PSVFIFPPSDEQLKSG |
| | | | | KMNSLQTDDT | SGSGTDYS | VHNAKTKPREEQYNSTYRVVSVLTVLHQDWLNGKEY | TASVVCLLNNFYPREA |
| | | | | AMYYCARNPH | LTISNLEP | KCKVSNKALPAPIEKTISKAKGQPREPQVYTLPPSR | KVQWKVDNALQSGNSQ |
| | | | | YYGGTYEYFD | EDVATYYC | EEMTKNQVSLTCLVKGFYPSDIAVEWESNGQPENNY | ESVTEQDSKDSTYSLS |
| | | | | VWGTGTTVTV | QQYSNLPY | KTTPPVLDSDGSFFLYSKLTVDKSRWQQGNVFSCSV | STLTLSKADYEKHKVY |
| | | | | SS | TFGSGTKL | MHEALHNHYTQKSLSLSPGK | ACEVTHQGLSSPVTKS |
| | | | | | EIK | | FNRGEC |
| | | | | 541 | 542 | 543 | 544 |
| 17 | CD8B273 | IgG1 | Kappa | QVQLQQSGAE | DIQMTQSP | QVQLQQSGAELVKPGASVKLSCKASGYTFTEYTIHW | DIQMTQSPASLSASVG |
| | | | | LVKPGASVKL | ASLSASVG | VKQRSGQGLEWIGWFYPGTGSIKYNEKFKDKATLTA | ETVTITCRASGNIHNY |
| | | | | SCKASGYTFT | ETVTITCR | DKSSHTVYMELSKLTSEDSAVYFCARHEDNHYYDGN | LAWFQQKQGKSPQLLV |
| | | | | EYTIHWVKQR | ASGNIHNY | SWFAYWGQGTLVTVSAASTKGPSVFPLAPSSKSTSG | YNAKTLADGVPSRFSG |
| | | | | SGQGLEWIGW | LAWFQQKQ | GTAALGCLVKDYFPEPVTVSWNSGALTSGVHTFPAV | SGSGTQYSLKINSLQA |
| | | | | FYPGTGSIKY | GKSPQLLV | LQSSGLYSLSSVVTVPSSSLGTQTYICNVNHKPSNT | EDFGSYYCQHFWSTPY |
| | | | | NEKFKDKATL | YNAKTLAD | KVDKKVEPKSCDKTHTCPPCPAPELLGGPSVFLFPP | TFGSGTKLEIKRTVAA |
| | | | | TADKSSHTVY | GVPSRFSG | KPKDTLMISRTPEVTCVVVDVSHEDPEVKFNWYVDG | PSVFIFPPSDEQLKSG |
| | | | | MELSKLTSED | SGSGTQYS | VEVHNAKTKPREEQYNSTYRVVSVLTVLHQDWLNGK | TASVVCLLNNFYPREA |
| | | | | SAVYFCARHE | LKINSLQA | EYKCKVSNKALPAPIEKTISKAKGQPREPQVYTLPP | KVQWKVDNALQSGNSQ |
| | | | | DNHYYDGNSW | EDFGSYYC | SREEMTKNQVSLTCLVKGFYPSDIAVEWESNGQPEN | ESVTEQDSKDSTYSLS |
| | | | | FAYWGQGTLV | QHFWSTPY | NYKTTPPVLDSDGSFFLYSKLTVDKSRWQQGNVFSC | STLTLSKADYEKHKVY |
| | | | | TVSA | TFGSGTKL | SVMHEALHNHYTQKSLSLSPGK | ACEVTHQGLSSPVTKS |
| | | | | | EIK | | FNRGEC |
| | | | | 575 | 576 | 577 | 578 |
| 18 | CD8B288 | IgG1 | Kappa | QVQLQQSGAE | DIQMTQSP | QVQLQQSGAELVKPGASVKLSCKASGYTFTEYTIHW | DIQMTQSPASLSASVG |
| | | | | LVKPGASVKL | ASLSASVG | VKQKSGQGLEWIGWFYPGNGNMRYNEKFKDKATLTA | DTVTITCRASGNIHNY |
| | | | | SCKASGYTFT | DTVTITCR | DRSSHTVYMELSRLTSEDSAVYFCARYEDNHYYDGA | LAWFQQKQGKSPQLLV |
| | | | | EYTIHWVKQK | ASGNIHNY | SWFAYWGQGTSVTVSSASTKGPSVFPLAPSSKSTSG | YNAKTLADGVPSRFSG |
| | | | | SGQGLEWIGW | LAWFQQKQ | GTAALGCLVKDYFPEPVTVSWNSGALTSGVHTFPAV | SGSGTQFSLKINSLQP |
| | | | | FYPGNGNMRY | GKSPQLLV | LQSSGLYSLSSVVTVPSSSLGTQTYICNVNHKPSNT | EDFGTYYCQHFWSTPF |
| | | | | NEKFKDKATL | YNAKTLAD | KVDKKVEPKSCDKTHTCPPCPAPELLGGPSVFLFPP | TFGSGTKLEMKRTVAA |
| | | | | TADRSSHTVY | GVPSRFSG | KPKDTLMISRTPEVTCVVVDVSHEDPEVKFNWYVDG | PSVFIFPPSDEQLKSG |
| | | | | MELSRLTSED | SGSGTQFS | VEVHNAKTKPREEQYNSTYRVVSVLTVLHQDWLNGK | TASVVCLLNNFYPREA |
| | | | | SAVYFCARYE | LKINSLQP | EYKCKVSNKALPAPIEKTISKAKGQPREPQVYTLPP | KVQWKVDNALQSGNSQ |
| | | | | DNHYYDGASW | EDFGTYYC | SREEMTKNQVSLTCLVKGFYPSDIAVEWESNGQPEN | ESVTEQDSKDSTYSLS |
| | | | | FAYWGQGTSV | QHFWSTPF | NYKTTPPVLDSDGSFFLYSKLTVDKSRWQQGNVFSC | STLTLSKADYEKHKVY |
| | | | | TVSS | TFGSGTKL | SVMHEALHNHYTQKSLSLSPGK | ACEVTHQGLSSPVTKS |
| | | | | | EMK | | FNRGEC |
| | | | | 609 | 610 | 611 | 612 |
| 19 | CD8B292 | IgG1 | Kappa | QVQLQQPGAE | QIVLTQSP | QVQLQQPGAELVKPGASVKLSCTGSGFNFKDDYIYW | QIVLTQSPAIMSASLG |
| | | | | LVKPGASVKL | AIMSASLG | VKQRPEQGLEWIGWIDPENGATEYASKFQGKATITA | ERVTLTCTASSSVSSS |
| | | | | SCTGSGFNFK | ERVTLTCT | DTSSNIAYLQLSSLTSEDTAVYYCSLHDYGYAMDYW | YLHWYQQKPGSSPKLW |
| | | | | DDYIYWVKQR | ASSSVSSS | GQGTSVTVSSASTKGPSVFPLAPSSKSTSGGTAALG | IYSTSNLASGVPARFS |
| | | | | PEQGLEWIGW | YLHWYQQK | CLVKDYFPEPVTVSWNSGALTSGVHTFPAVLQSSGL | GSGSGTSYSLTISNME |
| | | | | IDPENGATEY | PGSSPKLW | YSLSSVVTVPSSSLGTQTYICNVNHKPSNTKVDKKV | AEDAATYYCHQYHRSP |
| | | | | ASKFQGKATI | IYSTSNLA | EPKSCDKTHTCPPCPAPELLGGPSVFLFPPKPKDTL | LTFGGGTKLEIKRTVA |
| | | | | TADTSSNIAY | SGVPARFS | MISRTPEVTCVVVDVSHEDPEVKFNWYVDGVEVHNA | APSVFIFPPSDEQLKS |
| | | | | LQLSSLTSED | GSGSGTSY | KTKPREEQYNSTYRVVSVLTVLHQDWLNGKEYKCKV | GTASVVCLLNNFYPRE |
| | | | | TAVYYCSLHD | SLTISNME | SNKALPAPIEKTISKAKGQPREPQVYTLPPSREEMT | AKVQWKVDNALQSGNS |
| | | | | YGYAMDYWGQ | AEDAATYY | KNQVSLTCLVKGFYPSDIAVEWESNGQPENNYKTTP | QESVTEQDSKDSTYSL |
| | | | | GTSVTVSS | CHQYHRSP | PVLDSDGSFFLYSKLTVDKSRWQQGNVFSCSVMHEA | SSTLTLSKADYEKHKV |
| | | | | | LTFGGGTK | LHNHYTQKSLSLSPGK | YACEVTHQGLSSPVTK |
| | | | | | LEIK | | SFNRGEC |
| | | | | 643 | 644 | 645 | 646 |
| 20 | CD8B303 | IgG1 | Kappa | QVQLKESGPG | DVQMIQSP | QVQLKESGPGLVAPSQSLSITCTVSGFSLSIYSIHW | DVQMIQSPSSLSASLG |
| | | | | LVAPSQSLSI | SSLSASLG | VRQPPGKGLEWLGMIWGGGSTDYNSTLNSRLSIIKD | GTVTITCKASQDIKKY |
| | | | | TCTVSGFSLS | GTVTITCK | NSKSQVFLKMNSLQTDDTAMYYCARNPHHYGGSTGA | MAWYQHKPGKGPRLLI |
| | | | | IYSIHWVRQP | ASQDIKKY | MDYWGQGTTVTVSSASTKGPSVFPLAPSSKSTSGGT | HYTSSLQPGIPSRFSG |
| | | | | PGKGLEWLGM | MAWYQHKP | AALGCLVKDYFPEPVTVSWNSGALTSGVHTFPAVLQ | SGSGRDYYFSISNLEP |
| | | | | IWGGGSTDYN | GKGPRLLI | SSGLYSLSSVVTVPSSSLGTQTYICNVNHKPSNTKV | EDIATYFCLQYDNLFT |
| | | | | STLNSRLSII | HYTSSLQP | DKKVEPKSCDKTHTCPPCPAPELLGGPSVFLFPPKP | FGSGTKLELKRTVAAP |
| | | | | KDNSKSQVFL | GIPSRFSG | KDTLMISRTPEVTCVVVDVSHEDPEVKFNWYVDGVE | SVFIFPPSDEQLKSGT |
| | | | | KMNSLQTDDT | SGSGRDYY | VHNAKTKPREEQYNSTYRVVSVLTVLHQDWLNGKEY | ASVVCLLNNFYPREAK |
| | | | | AMYYCARNPH | FSISNLEP | KCKVSNKALPAPIEKTISKAKGQPREPQVYTLPPSR | VQWKVDNALQSGNSQE |
| | | | | HYGGSTGAMD | EDIATYFC | EEMTKNQVSLTCLVKGFYPSDIAVEWESNGQPENNY | SVTEQDSKDSTYSLSS |
| | | | | YWGQGTTVTV | LQYDNLFT | KTTPPVLDSDGSFFLYSKLTVDKSRWQQGNVFSCSV | TLTLSKADYEKHKVYA |
| | | | | SS | FGSGTKLE | MHEALHNHYTQKSLSLSPGK | CEVTHQGLSSPVTKSF |
| | | | | | LK | | NRGEC |
| | | | | 677 | 678 | 679 | 680 |
| 21 | CD8B304 | IgG1 | Kappa | QVTLKESGPG | DIQMTQTT | QVTLKESGPGILKPSQTLSLTCSFSGFSLSTSGMNV | DIQMTQTTSSLSASLG |
| | | | | ILKPSQTLSL | SSLSASLG | GWIRQPSGKGLEWLAHIWWDDDKYYNPSLKSQLTIS | DRVTISCRASQDIRNY |
| | | | | TCSFSGFSLS | DRVTISCR | KDTSRNQVFLKITSVDTADTATYYCARRGNYGNYEF | LNWYQQKPDGTVKLLI |
| | | | | TSGMNVGWIR | ASQDIRNY | AYWGQGTTVTVSSASTKGPSVFPLAPSSKSTSGGTA | YHTSRLHSGVPSRFSG |
| | | | | QPSGKGLEWL | LNWYQQKP | ALGCLVKDYFPEPVTVSWNSGALTSGVHTFPAVLQS | SGSGTDYSLTISNLDQ |
| | | | | AHIWWDDDKY | DGTVKLLI | SGLYSLSSVVTVPSSSLGTQTYICNVNHKPSNTKVD | EDIATYFCQQGNTLPW |
| | | | | YNPSLKSQLT | YHTSRLHS | KKVEPKSCDKTHTCPPCPAPELLGGPSVFLFPPKPK | TFGAGTKLELKRTVAA |
| | | | | ISKDTSRNQV | GVPSRFSG | DTLMISRTPEVTCVVVDVSHEDPEVKFNWYVDGVEV | PSVFIFPPSDEQLKSG |
| | | | | FLKITSVDTA | SGSGTDYS | HNAKTKPREEQYNSTYRVVSVLTVLHQDWLNGKEYK | TASVVCLLNNFYPREA |
| | | | | DTATYYCARR | LTISNLDQ | CKVSNKALPAPIEKTISKAKGQPREPQVYTLPPSRE | KVQWKVDNALQSGNSQ |
| | | | | GNYGNYEFAY | EDIATYFC | EMTKNQVSLTCLVKGFYPSDIAVEWESNGQPENNYK | ESVTEQDSKDSTYSLS |
| | | | | WGQGTTVTVS | QQGNTLPW | TTPPVLDSDGSFFLYSKLTVDKSRWQQGNVFSCSVM | STLTLSKADYEKHKVY |
| | | | | S | TFGAGTKL | HEALHNHYTQKSLSLSPGK | ACEVTHQGLSSPVTKS |
| | | | | | ELK | | FNRGEC |
| | | | | 711 | 712 | 713 | 714 |
| 22 | CD8B312 | IgG1 | Kappa | QVQLQQPGAD | DIVLTQSP | QVQLQQPGADLVKPGASVKLSCKASGYTFTSFWMHW | DIVLTQSPATLSVTPG |
| | | | | LVKPGASVKL | ATLSVTPG | VKQRPGQGLEWIGNVDPSDSQTHYNQKFKDKATLTV | DSVSLSCRASQSINNN |
| | | | | SCKASGYTFT | DSVSLSCR | DKSSNTAYMQLSSLTSEDSAVYYCARSTYYRYDGPF | LHWYQQKSHESPRLLI |
| | | | | SFWMHWVKQR | ASQSINNN | TYWGQGTTVTVSSASTKGPSVFPLAPSSKSTSGGTA | KYTSQSISGIPSRFSG |
| | | | | PGQGLEWIGN | LHWYQQKS | ALGCLVKDYFPEPVTVSWNSGALTSGVHTFPAVLQS | SGSGPDFTLSINSVET |
| | | | | VDPSDSQTHY | HESPRLLI | SGLYSLSSVVTVPSSSLGTQTYICNVNHKPSNTKVD | EDFGMYFCQQSNSWPL |
| | | | | NQKFKDKATL | KYTSQSIS | KKVEPKSCDKTHTCPPCPAPELLGGPSVFLFPPKPK | TFGGGTKLEIKRTVAA |
| | | | | TVDKSSNTAY | GIPSRFSG | DTLMISRTPEVTCVVVDVSHEDPEVKFNWYVDGVEV | PSVFIFPPSDEQLKSG |
| | | | | MQLSSLTSED | SGSGPDFT | HNAKTKPREEQYNSTYRVVSVLTVLHQDWLNGKEYK | TASVVCLLNNFYPREA |
| | | | | SAVYYCARST | LSINSVET | CKVSNKALPAPIEKTISKAKGQPREPQVYTLPPSRE | KVQWKVDNALQSGNSQ |
| | | | | YYRYDGPFTY | EDFGMYFC | EMTKNQVSLTCLVKGFYPSDIAVEWESNGQPENNYK | ESVTEQDSKDSTYSLS |
| | | | | WGQGTTVTVS | QQSNSWPL | TTPPVLDSDGSFFLYSKLTVDKSRWQQGNVFSCSVM | STLTLSKADYEKHKVY |
| | | | | S | TFGGGTKL | HEALHNHYTQKSLSLSPGK | ACEVTHQGLSSPVTKS |
| | | | | | EIK | | FNRGEC |
| | | | | 745 | 746 | 747 | 748 |
| 23 | CD8B347 | IgG1 | Kappa | QVQLQQPGAE | DIQMTQSP | QVQLQQPGAELAKPGTSVKMSCKASGYTFTSYWMNW | DIQMTQSPASLSASVG |
| | | | | LAKPGTSVKM | ASLSASVG | IKQRPGQGLEWIGAVNPSNSYTEYAQKFKDKAILTA | ETVTITCRASGNIHNY |
| | | | | SCKASGYTFT | ETVTITCR | DKSSSTAYMSLSGLTSEASAVYYCARSGLYNTNHLA | LAWYQQKQGKSPQLLV |
| | | | | SYWMNWIKQR | ASGNIHNY | WFAYWGQGTLVTVSAASTKGPSVFPLAPSSKSTSGG | FNAETLADGVPSRFSG |
| | | | | PGQGLEWIGA | LAWYQQKQ | TAALGCLVKDYFPEPVTVSWNSGALTSGVHTFPAVL | SGSGTQFSLKINSLQP |
| | | | | VNPSNSYTEY | GKSPQLLV | QSSGLYSLSSVVTVPSSSLGTQTYICNVNHKPSNTK | EDFGTYYCQHFWNNPL |
| | | | | AQKFKDKAIL | FNAETLAD | VDKKVEPKSCDKTHTCPPCPAPELLGGPSVFLFPPK | TLGAGTKLELKRTVAA |
| | | | | TADKSSSTAY | GVPSRFSG | PKDTLMISRTPEVTCVVVDVSHEDPEVKFNWYVDGV | PSVFIFPPSDEQLKSG |
| | | | | MSLSGLTSEA | SGSGTQFS | EVHNAKTKPREEQYNSTYRVVSVLTVLHQDWLNGKE | TASVVCLLNNFYPREA |
| | | | | SAVYYCARSG | LKINSLQP | YKCKVSNKALPAPIEKTISKAKGQPREPQVYTLPPS | KVQWKVDNALQSGNSQ |
| | | | | LYNTNHLAWF | EDFGTYYC | REEMTKNQVSLTCLVKGFYPSDIAVEWESNGQPENN | ESVTEQDSKDSTYSLS |
| | | | | AYWGQGTLVT | QHFWNNPL | YKTTPPVLDSDGSFFLYSKLTVDKSRWQQGNVFSCS | STLTLSKADYEKHKVY |
| | | | | VSA | TLGAGTKL | VMHEALHNHYTQKSLSLSPGK | ACEVTHQGLSSPVTKS |
| | | | | | ELK | | FNRGEC |
| | | | | 779 | 780 | 781 | 782 |
| 24 | CD8B350 | IgG1 | Kappa | EVQLQQSGAE | DIVMTQSP | EVQLQQSGAELAKPGTSVKMSCKASGYTFAAYWINW | DIVMTQSPASLSASVG |
| | | | | LAKPGTSVKM | ASLSASVG | LKQRPGQGLEWIGSINPSNGYTEYSQKFKDKAILTA | ETVTITCRASGNIHNY |
| | | | | SCKASGYTFA | ETVTITCR | DKSSSTAYMQLSSLTSEDSAVYYCSRSGLYYTNHLA | LAWYQQKQGKSPQVLV |
| | | | | AYWINWLKQR | ASGNIHNY | WCPYWGQGTTVTVSSASTKGPSVFPLAPSSKSTSGG | YNAETLADSVPSRFSG |
| | | | | PGQGLEWIGS | LAWYQQKQ | TAALGCLVKDYFPEPVTVSWNSGALTSGVHTFPAVL | SGSGTQFSLKINSLQP |
| | | | | INPSNGYTEY | GKSPQVLV | QSSGLYSLSSVVTVPSSSLGTQTYICNVNHKPSNTK | EDFGNYYCQHFWNSPL |
| | | | | SQKFKDKAIL | YNAETLAD | VDKKVEPKSCDKTHTCPPCPAPELLGGPSVFLFPPK | TFGGGTKLEIKRTVAA |
| | | | | TADKSSSTAY | SVPSRFSG | PKDTLMISRTPEVTCVVVDVSHEDPEVKFNWYVDGV | PSVFIFPPSDEQLKSG |
| | | | | MQLSSLTSED | SGSGTQFS | EVHNAKTKPREEQYNSTYRVVSVLTVLHQDWLNGKE | TASVVCLLNNFYPREA |
| | | | | SAVYYCSRSG | LKINSLQP | YKCKVSNKALPAPIEKTISKAKGQPREPQVYTLPPS | KVQWKVDNALQSGNSQ |
| | | | | LYYTNHLAWC | EDFGNYYC | REEMTKNQVSLTCLVKGFYPSDIAVEWESNGQPENN | ESVTEQDSKDSTYSLS |
| | | | | PYWGQGTTVT | QHFWNSPL | YKTTPPVLDSDGSFFLYSKLTVDKSRWQQGNVFSCS | STLTLSKADYEKHKVY |
| | | | | VSS | TFGGGTKL | VMHEALHNHYTQKSLSLSPGK | ACEVTHQGLSSPVTKS |
| | | | | | EIK | | FNRGEC |
| | | | | 813 | 814 | 815 | 816 |
| 25 | CD8B356 | IgG1 | Kappa | DVQLQESGPG | DIVLTQSQ | DVQLQESGPGLVKPSQSLSLTCSVTGYSITSGYYWN | DIVLTQSQKFMSTTVG |
| | | | | LVKPSQSLSL | KFMSTTVG | WIRQFPGNKLEWMGYISYDGSNNYNPSLKNRISITR | DRVSITCKASQNVGTA |
| | | | | TCSVTGYSIT | DRVSITCK | DTSKNQFFLKLNSVTTEDTATYYCVRNHGDAMDYWG | VAWYQQKPGQSPKLLI |
| | | | | SGYYWNWIRQ | ASQNVGTA | QGTSVTVSSASTKGPSVFPLAPSSKSTSGGTAALGC | YSASYRYTGVPDRFTG |
| | | | | FPGNKLEWMG | VAWYQQKP | LVKDYFPEPVTVSWNSGALTSGVHTFPAVLQSSGLY | SGSGTHFTLTISNMQS |
| | | | | YISYDGSNNY | GQSPKLLI | SLSSVVTVPSSSLGTQTYICNVNHKPSNTKVDKKVE | EDLADYFCQQYSSYLT |
| | | | | NPSLKNRISI | YSASYRYT | PKSCDKTHTCPPCPAPELLGGPSVFLFPPKPKDTLM | FGSGTKLEIKRTVAAP |
| | | | | TRDTSKNQFF | GVPDRFTG | ISRTPEVTCVVVDVSHEDPEVKFNWYVDGVEVHNAK | SVFIFPPSDEQLKSGT |
| | | | | LKLNSVTTED | SGSGTHFT | TKPREEQYNSTYRVVSVLTVLHQDWLNGKEYKCKVS | ASVVCLLNNFYPREAK |
| | | | | TATYYCVRNH | LTISNMQS | NKALPAPIEKTISKAKGQPREPQVYTLPPSREEMTK | VQWKVDNALQSGNSQE |
| | | | | GDAMDYWGQG | EDLADYFC | NQVSLTCLVKGFYPSDIAVEWESNGQPENNYKTTPP | SVTEQDSKDSTYSLSS |
| | | | | TSVTVSS | QQYSSYLT | VLDSDGSFFLYSKLTVDKSRWQQGNVFSCSVMHEAL | TLTLSKADYEKHKVYA |
| | | | | | FGSGTKLE | HNHYTQKSLSLSPGK | CEVTHQGLSSPVTKSF |
| | | | | | IK | | NRGEC |
| | | | | 847 | 848 | 849 | 850 |
| 26 | CD8B369 | IgG1 | Kappa | QVQLQQSGAE | DIVMTQSP | QVQLQQSGAELVKPGASVKLSCKTSGFTFTNTYISW | DIVMTQSPASLSASVG |
| | | | | LVKPGASVKL | ASLSASVG | LKQKPRQSLEWIAWIYTGTGGTWYNQKFTDKAQLTV | ETVTITCRASENIYSY |
| | | | | SCKTSGFTFT | ETVTITCR | DTSSSTAYMQVSSLTSEDSAIYYCARTNWDWYFDVW | LAWYQQKQGKSPQLLV |
| | | | | NTYISWLKQK | ASENIYSY | GAGTSVTVSSASTKGPSVFPLAPSSKSTSGGTAALG | YYAKTLTDGVPSRFSG |
| | | | | PRQSLEWIAW | LAWYQQKQ | CLVKDYFPEPVTVSWNSGALTSGVHTFPAVLQSSGL | SGSGTQFSLKINSLQP |
| | | | | IYTGTGGTWY | GKSPQLLV | YSLSSVVTVPSSSLGTQTYICNVNHKPSNTKVDKKV | EDFGSYYCQHHYGRPY |
| | | | | NQKFTDKAQL | YYAKTLTD | EPKSCDKTHTCPPCPAPELLGGPSVFLFPPKPKDTL | TFGSGTKLEIKRTVAA |
| | | | | TVDTSSSTAY | GVPSRFSG | MISRTPEVTCVVVDVSHEDPEVKFNWYVDGVEVHNA | PSVFIFPPSDEQLKSG |
| | | | | MQVSSLTSED | SGSGTQFS | KTKPREEQYNSTYRVVSVLTVLHQDWLNGKEYKCKV | TASVVCLLNNFYPREA |
| | | | | SAIYYCARTN | LKINSLQP | SNKALPAPIEKTISKAKGQPREPQVYTLPPSREEMT | KVQWKVDNALQSGNSQ |
| | | | | WDWYFDVWGA | EDFGSYYC | KNQVSLTCLVKGFYPSDIAVEWESNGQPENNYKTTP | ESVTEQDSKDSTYSLS |
| | | | | GTSVTVSS | QHHYGRPY | PVLDSDGSFFLYSKLTVDKSRWQQGNVFSCSVMHEA | STLTLSKADYEKHKVY |
| | | | | | TFGSGTKL | LHNHYTQKSLSLSPGK | ACEVTHQGLSSPVTKS |
| | | | | | EIK | | FNRGEC |
| | | | | 881 | 882 | 883 | 884 |
| 27 | CD8B371 | IgG1 | Kappa | EVKLVESGGG | NTQMNQTP | EVKLVESGGGLVQPGSSMKLSCTASGFTFSDYYMAW | NTQMNQTPSSLSASLG |
| | | | | LVQPGSSMKL | SSLSASLG | VRQVPEKGLEWVAHINYDGSITYYLDSLKSRFIISR | DTITITCHASQNINVW |
| | | | | SCTASGFTFS | DTITITCH | DNAKNILYLQMSSLKSEDTATYYCAREDYSNYGFAY | LSWYQQKPGNIPKLLI |
| | | | | DYYMAWVRQV | ASQNINVW | WGQGTLVTVSAASTKGPSVFPLAPSSKSTSGGTAAL | YKASNLHTGVPSRFSG |
| | | | | PEKGLEWVAH | LSWYQQKP | GCLVKDYFPEPVTVSWNSGALTSGVHTFPAVLQSSG | SGSGTGFTLTISSLQP |
| | | | | INYDGSITYY | GNIPKLLI | LYSLSSVVTVPSSSLGTQTYICNVNHKPSNTKVDKK | EDIATYYCQQGQSYPL |
| | | | | LDSLKSRFII | YKASNLHT | VEPKSCDKTHTCPPCPAPELLGGPSVFLFPPKPKDT | TFGSGTKLEMKRTVAA |
| | | | | SRDNAKNILY | GVPSRFSG | LMISRTPEVTCVVVDVSHEDPEVKFNWYVDGVEVHN | PSVFIFPPSDEQLKSG |
| | | | | LQMSSLKSED | SGSGTGFT | AKTKPREEQYNSTYRVVSVLTVLHQDWLNGKEYKCK | TASVVCLLNNFYPREA |
| | | | | TATYYCARED | LTISSLQP | VSNKALPAPIEKTISKAKGQPREPQVYTLPPSREEM | KVQWKVDNALQSGNSQ |
| | | | | YSNYGFAYWG | EDIATYYC | TKNQVSLTCLVKGFYPSDIAVEWESNGQPENNYKTT | ESVTEQDSKDSTYSLS |
| | | | | QGTLVTVSA | QQGQSYPL | PPVLDSDGSFFLYSKLTVDKSRWQQGNVFSCSVMHE | STLTLSKADYEKHKVY |
| | | | | | TFGSGTKL | ALHNHYTQKSLSLSPGK | ACEVTHQGLSSPVTKS |
| | | | | | EMK | | FNRGEC |
| | | | | 915 | 916 | 917 | 918 |
| 28 | CD8B182 | IgG1 | Kappa | EVQLQQSGAA | DIKMTQSP | EVQLQQSGAALAKPGTSVKMSCKASGYTFTSYWMNW | DIKMTQSPASLSASVG |
| | | | | LAKPGTSVKM | ASLSASVG | VRQRPGQGLEWIGAVNPTNYYTEYIQKFKDKAILTA | ETVTITCRASENIHNY |
| | | | | SCKASGYTFT | ETVTITCR | DKSSSTAYMHLSGLTSEDSAVYYCARSGLYNTNHLA | LAWYQQIQGKSPQLLV |
| | | | | SYWMNWVRQR | ASENIHNY | WFAYWGQGTTVTVSSASTKGPSVFPLAPSSKSTSGG | YNAKTLANGVPSRFSG |
| | | | | PGQGLEWIGA | LAWYQQIQ | TAALGCLVKDYFPEPVTVSWNSGALTSGVHTFPAVL | SASGTQFSLTINSLQP |
| | | | | VNPTNYYTEY | GKSPQLLV | QSSGLYSLSSVVTVPSSSLGTQTYICNVNHKPSNTK | EDFGSYYCQHFWTTPL |
| | | | | IQKFKDKAIL | YNAKTLAN | VDKKVEPKSCDKTHTCPPCPAPELLGGPSVFLFPPK | TFGAGTKLELKRTVAA |
| | | | | TADKSSSTAY | GVPSRFSG | PKDTLMISRTPEVTCVVVDVSHEDPEVKFNWYVDGV | PSVFIFPPSDEQLKSG |
| | | | | MHLSGLTSED | SASGTQFS | EVHNAKTKPREEQYNSTYRVVSVLTVLHQDWLNGKE | TASVVCLLNNFYPREA |
| | | | | SAVYYCARSG | LTINSLQP | YKCKVSNKALPAPIEKTISKAKGQPREPQVYTLPPS | KVQWKVDNALQSGNSQ |
| | | | | LYNTNHLAWF | EDFGSYYC | REEMTKNQVSLTCLVKGFYPSDIAVEWESNGQPENN | ESVTEQDSKDSTYSLS |
| | | | | AYWGQGTTVT | QHFWTTPL | YKTTPPVLDSDGSFFLYSKLTVDKSRWQQGNVFSCS | STLTLSKADYEKHKVY |
| | | | | VSS | TFGAGTKL | VMHEALHNHYTQKSLSLSPGK | ACEVTHQGLSSPVTKS |
| | | | | | ELK | | FNRGEC |
| | | | | 949 | 950 | 951 | 952 |
| 29 | CD8B205 | IgG1 | Kappa | QVQLQQPGAE | DIQMTQSP | QVQLQQPGAELVKPGASVKLSCKASGYSFNSYWMHW | DIQMTQSPASLSASVG |
| | | | | LVKPGASVKL | ASLSASVG | VKQRPGQGLEWIGNIDPSDSETHYNQKFKDKATLTV | ETVTITCRASENIYSY |
| | | | | SCKASGYSFN | ETVTITCR | DKSSSTAYMQLSSLTSEDSAVYYCARVYYSYYSYDA | LAWYQQKQGKSPQLLV |
| | | | | SYWMHWVKQR | ASENIYSY | TYFDYWGQGTTLTVSSASTKGPSVFPLAPSSKSTSG | YNAKTLAEGVPSRFSG |
| | | | | PGQGLEWIGN | LAWYQQKQ | GTAALGCLVKDYFPEPVTVSWNSGALTSGVHTFPAV | SGSGTQFSLKINSLQP |
| | | | | IDPSDSETHY | GKSPQLLV | LQSSGLYSLSSVVTVPSSSLGTQTYICNVNHKPSNT | EDFGSYYCQHHYTTPL |
| | | | | NQKFKDKATL | YNAKTLAE | KVDKKVEPKSCDKTHTCPPCPAPELLGGPSVFLFPP | TFGGGTKLEIKRTVAA |
| | | | | TVDKSSSTAY | GVPSRFSG | KPKDTLMISRTPEVTCVVVDVSHEDPEVKFNWYVDG | PSVFIFPPSDEQLKSG |
| | | | | MQLSSLTSED | SGSGTQFS | VEVHNAKTKPREEQYNSTYRVVSVLTVLHQDWLNGK | TASVVCLLNNFYPREA |
| | | | | SAVYYCARVY | LKINSLQP | EYKCKVSNKALPAPIEKTISKAKGQPREPQVYTLPP | KVQWKVDNALQSGNSQ |
| | | | | YSYYSYDATY | EDFGSYYC | SREEMTKNQVSLTCLVKGFYPSDIAVEWESNGQPEN | ESVTEQDSKDSTYSLS |
| | | | | FDYWGQGTTL | QHHYTTPL | NYKTTPPVLDSDGSFFLYSKLTVDKSRWQQGNVFSC | STLTLSKADYEKHKVY |
| | | | | TVSS | TFGGGTKL | SVMHEALHNHYTQKSLSLSPGK | ACEVTHQGLSSPVTKS |
| | | | | | EIK | | FNRGEC |
| | | | | 983 | 984 | 985 | 986 |
| 30 | CD8B223 | IgG1 | Kappa | DVQLQESGPI | DIVMTQSQ | DVQLQESGPILVAPSQSLSITCTVSGFSLTSYSVHW | DIVMTQSQKFMSTSVG |
| | | | | LVAPSQSLSI | KFMSTSVG | VRQPPGKGLEWLGVIWAGGSTNYNSAFMSRLTISKD | DRVRVTCKASQNVNTD |
| | | | | TCTVSGFSLT | DRVRVTCK | NSESQVFLKMISLQTDDTAMYYCAKHSYYSFDAFDY | VAWYQQKPGQSPKALI |
| | | | | SYSVHWVRQP | ASQNVNTD | WGQGTTLTVSSASTKGPSVFPLAPSSKSTSGGTAAL | YSASYRYSGVPDRFTG |
| | | | | PGKGLEWLGV | VAWYQQKP | GCLVKDYFPEPVTVSWNSGALTSGVHTFPAVLQSSG | SGSGTDFTLTISNVQS |
| | | | | IWAGGSTNYN | GQSPKALI | LYSLSSVVTVPSSSLGTQTYICNVNHKPSNTKVDKK | EDLAEYFCQQCNSYPL |
| | | | | SAFMSRLTIS | YSASYRYS | VEPKSCDKTHTCPPCPAPELLGGPSVFLFPPKPKDT | TFGAGTKLELKRTVAA |
| | | | | KDNSESQVFL | GVPDRFTG | LMISRTPEVTCVVVDVSHEDPEVKFNWYVDGVEVHN | PSVFIFPPSDEQLKSG |
| | | | | KMISLQTDDT | SGSGTDFT | AKTKPREEQYNSTYRVVSVLTVLHQDWLNGKEYKCK | TASVVCLLNNFYPREA |
| | | | | AMYYCAKHSY | LTISNVQS | VSNKALPAPIEKTISKAKGQPREPQVYTLPPSREEM | KVQWKVDNALQSGNSQ |
| | | | | YSFDAFDYWG | EDLAEYFC | TKNQVSLTCLVKGFYPSDIAVEWESNGQPENNYKTT | ESVTEQDSKDSTYSLS |
| | | | | QGTTLTVSS | QQCNSYPL | PPVLDSDGSFFLYSKLTVDKSRWQQGNVFSCSVMHE | STLTLSKADYEKHKVY |
| | | | | | TFGAGTKL | ALHNHYTQKSLSLSPGK | ACEVTHQGLSSPVTKS |
| | | | | | ELK | | FNRGEC |
| | | | | 1017 | 1018 | 1019 | 1020 |
| 31 | CD8B234 | IgG1 | Kappa | QVQLKESGPG | DIQMTQSS | QVQLKESGPGLVKPSQSLSLTCSVTGYSITSGYYWN | DIQMTQSSSSFSVSLG |
| | | | | LVKPSQSLSL | SSFSVSLG | WIRQFPGNKLEWMGYINYDGRNNYNPSLKNRISITR | DRVTITCKASEDIYNR |
| | | | | TCSVTGYSIT | DRVTITCK | DTSKNHFFLKLNSVTTEDTATYYCSRDQGYSKFYFD | LAWYQQRPGNAPRLLI |
| | | | | SGYYWNWIRQ | ASEDIYNR | YWGQGTTLTVSSASTKGPSVFPLAPSSKSTSGGTAA | SGATSLETGVPSRFSG |
| | | | | FPGNKLEWMG | LAWYQQRP | LGCLVKDYFPEPVTVSWNSGALTSGVHTFPAVLQSS | GGSGKDYTLSITSLQT |
| | | | | YINYDGRNNY | GNAPRLLI | GLYSLSSVVTVPSSSLGTQTYICNVNHKPSNTKVDK | EDVANYYCQQYWSFPR |
| | | | | NPSLKNRISI | SGATSLET | KVEPKSCDKTHTCPPCPAPELLGGPSVFLFPPKPKD | TFGGGTKLEIKRTVAA |
| | | | | TRDTSKNHFF | GVPSRFSG | TLMISRTPEVTCVVVDVSHEDPEVKFNWYVDGVEVH | PSVFIFPPSDEQLKSG |
| | | | | LKLNSVTTED | GGSGKDYT | NAKTKPREEQYNSTYRVVSVLTVLHQDWLNGKEYKC | TASVVCLLNNFYPREA |
| | | | | TATYYCSRDQ | LSITSLQT | KVSNKALPAPIEKTISKAKGQPREPQVYTLPPSREE | KVQWKVDNALQSGNSQ |
| | | | | GYSKFYFDYW | EDVANYYC | MTKNQVSLTCLVKGFYPSDIAVEWESNGQPENNYKT | ESVTEQDSKDSTYSLS |
| | | | | GQGTTLTVSS | QQYWSFPR | TPPVLDSDGSFFLYSKLTVDKSRWQQGNVFSCSVMH | STLTLSKADYEKHKVY |
| | | | | | TFGGGTKL | EALHNHYTQKSLSLSPGK | ACEVTHQGLSSPVTKS |
| | | | | | EIK | | FNRGEC |
| | | | | 1051 | 1052 | 1053 | 1054 |
| 32 | CD8B251 | IgG1 | Kappa | QVQLKGSGPG | DIKMTQSQ | QVQLKGSGPGLVQPSQSLSITCTVSGFSLTTYAVHW | DIKMTQSQKFMSTTVG |
| | | | | LVQPSQSLSI | KFMSTTVG | VRQSPGKGLEWLGVIWSGGSTDYNAAFISRLSISKD | DRVSITCKASQNVGTA |
| | | | | TCTVSGFSLT | DRVSITCK | NSKSQVFFKMNSLQADDTAIYYCARHSYYHYNAMDN | VAWYQQKPGQSPKLLI |
| | | | | TYAVHWVRQS | ASQNVGTA | WGQGTSVTVSSASTKGPSVFPLAPSSKSTSGGTAAL | YSASNRYTGVPDRFTG |
| | | | | PGKGLEWLGV | VAWYQQKP | GCLVKDYFPEPVTVSWNSGALTSGVHTFPAVLQSSG | SGSGTDFTLTISNMQS |
| | | | | IWSGGSTDYN | GQSPKLLI | LYSLSSVVTVPSSSLGTQTYICNVNHKPSNTKVDKK | EDLADYFCQQYSSYPF |
| | | | | AAFISRLSIS | YSASNRYT | VEPKSCDKTHTCPPCPAPELLGGPSVFLFPPKPKDT | TFGSGTKLEIKRTVAA |
| | | | | KDNSKSQVFF | GVPDRFTG | LMISRTPEVTCVVVDVSHEDPEVKFNWYVDGVEVHN | PSVFIFPPSDEQLKSG |
| | | | | KMNSLQADDT | SGSGTDFT | AKTKPREEQYNSTYRVVSVLTVLHQDWLNGKEYKCK | TASVVCLLNNFYPREA |
| | | | | AIYYCARHSY | LTISNMQS | VSNKALPAPIEKTISKAKGQPREPQVYTLPPSREEM | KVQWKVDNALQSGNSQ |
| | | | | YHYNAMDNWG | EDLADYFC | TKNQVSLTCLVKGFYPSDIAVEWESNGQPENNYKTT | ESVTEQDSKDSTYSLS |
| | | | | QGTSVTVSS | QQYSSYPF | PPVLDSDGSFFLYSKLTVDKSRWQQGNVFSCSVMHE | STLTLSKADYEKHKVY |
| | | | | | TFGSGTKL | ALHNHYTQKSLSLSPGK | ACEVTHQGLSSPVTKS |
| | | | | | EIK | | FNRGEC |
| | | | | 1085 | 1086 | 1087 | 1088 |
| 33 | CD8B269 | IgG1 | Kappa | DVQLQESGPG | DIVMTQSQ | DVQLQESGPGLVKPSQSLSLTCSVTGYSITSGYYWN | DIVMTQSQKFMSTSVG |
| | | | | LVKPSQSLSL | KFMSTSVG | WIRQFPGNKLEWMGYISYDGSNNYNPSLKNRISITR | DRVRVTCKASQNVGTD |
| | | | | TCSVTGYSIT | DRVRVTCK | DTSKNQFFLKLNSVTTEDTATYYCVRNHGDAMDHWG | VAWYQQKPGQSPKALI |
| | | | | SGYYWNWIRQ | ASQNVGTD | QGTTLTVSSASTKGPSVFPLAPSSKSTSGGTAALGC | YSASYRYSGVPDRFTG |
| | | | | FPGNKLEWMG | VAWYQQKP | LVKDYFPEPVTVSWNSGALTSGVHTFPAVLQSSGLY | SGSGTDFTLTISDVQS |
| | | | | YISYDGSNNY | GQSPKALI | SLSSVVTVPSSSLGTQTYICNVNHKPSNTKVDKKVE | EDLAEYFCQQYKSYPL |
| | | | | NPSLKNRISI | YSASYRYS | PKSCDKTHTCPPCPAPELLGGPSVFLFPPKPKDTLM | TFGAGTKLELKRTVAA |
| | | | | TRDTSKNQFF | GVPDRFTG | ISRTPEVTCVVVDVSHEDPEVKFNWYVDGVEVHNAK | PSVFIFPPSDEQLKSG |
| | | | | LKLNSVTTED | SGSGTDFT | TKPREEQYNSTYRVVSVLTVLHQDWLNGKEYKCKVS | TASVVCLLNNFYPREA |
| | | | | TATYYCVRNH | LTISDVQS | NKALPAPIEKTISKAKGQPREPQVYTLPPSREEMTK | KVQWKVDNALQSGNSQ |
| | | | | GDAMDHWGQG | EDLAEYFC | NQVSLTCLVKGFYPSDIAVEWESNGQPENNYKTTPP | ESVTEQDSKDSTYSLS |
| | | | | TTLTVSS | QQYKSYPL | VLDSDGSFFLYSKLTVDKSRWQQGNVFSCSVMHEAL | STLTLSKADYEKHKVY |
| | | | | | TFGAGTKL | HNHYTQKSLSLSPGK | ACEVTHQGLSSPVTKS |
| | | | | | ELK | | FNRGEC |
| | | | | 1119 | 1120 | 1121 | 1122 |
| 34 | CD8B290 | IgG1 | Kappa | QVQLKESGPG | DIVMTQSH | QVQLKESGPGLVAPSQSLSITCTVSGFSLSRYSVHW | DIVMTQSHKFMSTSVG |
| | | | | LVAPSQSLSI | KFMSTSVG | VRQPPGKGLVWLGMIWGGGSTDYNSALKSRLSISKD | DRVSITCKASQDVGTV |
| | | | | TCTVSGFSLS | DRVSITCK | NSKSQVFLKMNSLQTDDTAMYYCARIYFDNYVGFAY | VAWYQQKPGQSPKLLI |
| | | | | RYSVHWVRQP | ASQDVGTV | WGQGTTLTVSSASTKGPSVFPLAPSSKSTSGGTAAL | FWTSTRHTGVPDRFTG |
| | | | | PGKGLVWLGM | VAWYQQKP | GCLVKDYFPEPVTVSWNSGALTSGVHTFPAVLQSSG | SGSGTDFTLTISNVQS |
| | | | | IWGGGSTDYN | GQSPKLLI | LYSLSSVVTVPSSSLGTQTYICNVNHKPSNTKVDKK | EDLADYFCQQYSSYPY |
| | | | | SALKSRLSIS | FWTSTRHT | VEPKSCDKTHTCPPCPAPELLGGPSVFLFPPKPKDT | TFGSGTKLELKRTVAA |
| | | | | KDNSKSQVFL | GVPDRFTG | LMISRTPEVTCVVVDVSHEDPEVKFNWYVDGVEVHN | PSVFIFPPSDEQLKSG |
| | | | | KMNSLQTDDT | SGSGTDFT | AKTKPREEQYNSTYRVVSVLTVLHQDWLNGKEYKCK | TASVVCLLNNFYPREA |
| | | | | AMYYCARIYF | LTISNVQS | VSNKALPAPIEKTISKAKGQPREPQVYTLPPSREEM | KVQWKVDNALQSGNSQ |
| | | | | DNYVGFAYWG | EDLADYFC | TKNQVSLTCLVKGFYPSDIAVEWESNGQPENNYKTT | ESVTEQDSKDSTYSLS |
| | | | | QGTTLTVSS | QQYSSYPY | PPVLDSDGSFFLYSKLTVDKSRWQQGNVFSCSVMHE | STLTLSKADYEKHKVY |
| | | | | | TFGSGTKL | ALHNHYTQKSLSLSPGK | ACEVTHQGLSSPVTKS |
| | | | | | ELK | | FNRGEC |
| | | | | 1153 | 1154 | 1155 | 1156 |
| 35 | CD8B310 | IgG1 | Kappa | QVQLKESGPG | DVLMTQTP | QVQLKESGPGLVAPSQSLSITCTVSGFSLTNYAVHW | DVLMTQTPLSLPVSLG |
| | | | | LVAPSQSLSI | LSLPVSLG | VRQSPGKGLEWLGVIWTDGSTDYNAGFISRLSISKD | DQASISCRSSQTIVHS |
| | | | | TCTVSGFSLT | DQASISCR | NSKSQVFFKMNSLQADDTAIYYCARNNGYFPAFFAY | NGNTYLEWYLQKPGQS |
| | | | | NYAVHWVRQS | SSQTIVHS | WGQGTTVTVSSASTKGPSVFPLAPSSKSTSGGTAAL | PKLLMYKVSNRFSGVP |
| | | | | PGKGLEWLGV | NGNTYLEW | GCLVKDYFPEPVTVSWNSGALTSGVHTFPAVLQSSG | DRFGGSGSGTDFTLKI |
| | | | | IWTDGSTDYN | YLQKPGQS | LYSLSSVVTVPSSSLGTQTYICNVNHKPSNTKVDKK | SRVEAEDLGVYYCFQG |
| | | | | AGFISRLSIS | PKLLMYKV | VEPKSCDKTHTCPPCPAPELLGGPSVFLFPPKPKDT | SHAPFTFGSGTKLEIK |
| | | | | KDNSKSQVFF | SNRFSGVP | LMISRTPEVTCVVVDVSHEDPEVKFNWYVDGVEVHN | RTVAAPSVFIFPPSDE |
| | | | | KMNSLQADDT | DRFGGSGS | AKTKPREEQYNSTYRVVSVLTVLHQDWLNGKEYKCK | QLKSGTASVVCLLNNF |
| | | | | AIYYCARNNG | GTDFTLKI | VSNKALPAPIEKTISKAKGQPREPQVYTLPPSREEM | YPREAKVQWKVDNALQ |
| | | | | YFPAFFAYWG | SRVEAEDL | TKNQVSLTCLVKGFYPSDIAVEWESNGQPENNYKTT | SGNSQESVTEQDSKDS |
| | | | | QGTTVTVSS | GVYYCFQG | PPVLDSDGSFFLYSKLTVDKSRWQQGNVFSCSVMHE | TYSLSSTLTLSKADYE |
| | | | | | SHAPFTFG | ALHNHYTQKSLSLSPGK | KHKVYACEVTHQGLSS |
| | | | | | SGTKLEIK | | PVTKSFNRGEC |
| | | | | 1187 | 1188 | 1189 | 1190 |
| 36 | CD8B352 | IgG1 | Kappa | QVQLKESGPG | DIQMTQSS | QVQLKESGPGLVKPSQSLSLTCSVTGYSITSGYYWN | DIQMTQSSSSFSVSLG |
| | | | | LVKPSQSLSL | SSFSVSLG | WIRQFPGNKLEWMGYINYDGRNNYNPSLRNRISITR | DRVTITCKASEDIYNR |
| | | | | TCSVTGYSIT | DRVTITCK | DTSKNHFFLKLNSVTTEDTATYYCARDQGYSKFYFD | LAWYQQRPGNAPRLLI |
| | | | | SGYYWNWIRQ | ASEDIYNR | YWGQGTTLTVSSASTKGPSVFPLAPSSKSTSGGTAA | SGATSLETGVPSRFSG |
| | | | | FPGNKLEWMG | LAWYQQRP | LGCLVKDYFPEPVTVSWNSGALTSGVHTFPAVLQSS | SGSGKDYTLSITSLQT |
| | | | | YINYDGRNNY | GNAPRLLI | GLYSLSSVVTVPSSSLGTQTYICNVNHKPSNTKVDK | EDVANYYCQQYWSFPR |
| | | | | NPSLRNRISI | SGATSLET | KVEPKSCDKTHTCPPCPAPELLGGPSVFLFPPKPKD | TFGGGTKLEIKRTVAA |
| | | | | TRDTSKNHFF | GVPSRFSG | TLMISRTPEVTCVVVDVSHEDPEVKFNWYVDGVEVH | PSVFIFPPSDEQLKSG |
| | | | | LKLNSVTTED | SGSGKDYT | NAKTKPREEQYNSTYRVVSVLTVLHQDWLNGKEYKC | TASVVCLLNNFYPREA |
| | | | | TATYYCARDQ | LSITSLQT | KVSNKALPAPIEKTISKAKGQPREPQVYTLPPSREE | KVQWKVDNALQSGNSQ |
| | | | | GYSKFYFDYW | EDVANYYC | MTKNQVSLTCLVKGFYPSDIAVEWESNGQPENNYKT | ESVTEQDSKDSTYSLS |
| | | | | GQGTTLTVSS | QQYWSFPR | TPPVLDSDGSFFLYSKLTVDKSRWQQGNVFSCSVMH | STLTLSKADYEKHKVY |
| | | | | | TFGGGTKL | EALHNHYTQKSLSLSPGK | ACEVTHQGLSSPVTKS |
| | | | | | EIK | | FNRGEC |
| | | | | 1221 | 1222 | 1223 | 1224 |
| 37 | CD8B319 | IgG1 | Kappa | QVQLKESGPE | DIVMTQSQ | QVQLKESGPELKKPGETVKISCKASGYSFTAYYMHW | DIVMTQSQKFMSTTVG |
| | | | | LKKPGETVKI | KFMSTTVG | VKQSPEKSLEWIGEINPSAGGTTYNQKFKAKATLTV | DRVSITCKASQNVGTA |
| | | | | SCKASGYSFT | DRVSITCK | DKSSSTAFIQLKSLTSEDSAVYYCARWTNPFDYWGQ | VAWYQQKPGQSPKLLI |
| | | | | AYYMHWVKQS | ASQNVGTA | GTTLTVSSASTKGPSVFPLAPSSKSTSGGTAALGCL | YSASYRYTGVPDRFTG |
| | | | | PEKSLEWIGE | VAWYQQKP | VKDYFPEPVTVSWNSGALTSGVHTFPAVLQSSGLYS | SGSGTHFTLTISNIQS |
| | | | | INPSAGGTTY | GQSPKLLI | LSSVVTVPSSSLGTQTYICNVNHKPSNTKVDKKVEP | EDLADYFCQQYNNYLT |
| | | | | NQKFKAKATL | YSASYRYT | KSCDKTHTCPPCPAPELLGGPSVFLFPPKPKDTLMI | FGSGTKLEIKRTVAAP |
| | | | | TVDKSSSTAF | GVPDRFTG | SRTPEVTCVVVDVSHEDPEVKFNWYVDGVEVHNAKT | SVFIFPPSDEQLKSGT |
| | | | | IQLKSLTSED | SGSGTHFT | KPREEQYNSTYRVVSVLTVLHQDWLNGKEYKCKVSN | ASVVCLLNNFYPREAK |
| | | | | SAVYYCARWT | LTISNIQS | KALPAPIEKTISKAKGQPREPQVYTLPPSREEMTKN | VQWKVDNALQSGNSQE |
| | | | | NPFDYWGQGT | EDLADYFC | QVSLTCLVKGFYPSDIAVEWESNGQPENNYKTTPPV | SVTEQDSKDSTYSLSS |
| | | | | TLTVSS | QQYNNYLT | LDSDGSFFLYSKLTVDKSRWQQGNVFSCSVMHEALH | TLTLSKADYEKHKVYA |
| | | | | | FGSGTKLE | NHYTQKSLSLSPGK | CEVTHQGLSSPVTKSF |
| | | | | | IK | | NRGEC |
| | | | | 1255 | 1256 | 1257 | 1258 |
| 38 | CD8B194 | IgG1 | Kappa | QVQLQQPGAE | DIVMTQSQ | QVQLQQPGAELVKPGASVKLSCKASGYTFTSYWINW | DIVMTQSQKFMSTTVG |
| | | | | LVKPGASVKL | KFMSTTVG | VKQRPGQGLEWIGNIYPGSSSTNYNEKFKSKATLTV | DRVSITCKASQNVGTA |
| | | | | SCKASGYTFT | DRVSITCK | DTSSSAAYMQLSSLTSGDSAVYYCARELGPYYRYSA | VAWYQQKPGQSPKLLI |
| | | | | SYWINWVKQR | ASQNVGTA | MVYWGQGTTVTVSSASTKGPSVFPLAPSSKSTSGGT | YSASNRYTGVPDRFTG |
| | | | | PGQGLEWIGN | VAWYQQKP | AALGCLVKDYFPEPVTVSWNSGALTSGVHTFPAVLQ | SGSGTDFTLTISNMQS |
| | | | | IYPGSSSTNY | GQSPKLLI | SSGLYSLSSVVTVPSSSLGTQTYICNVNHKPSNTKV | EDLADYFCQQYSSYPF |
| | | | | NEKFKSKATL | YSASNRYT | DKKVEPKSCDKTHTCPPCPAPELLGGPSVFLFPPKP | TFGSGTKLEIKRTVAA |
| | | | | TVDTSSSAAY | GVPDRFTG | KDTLMISRTPEVTCVVVDVSHEDPEVKFNWYVDGVE | PSVFIFPPSDEQLKSG |
| | | | | MQLSSLTSGD | SGSGTDFT | VHNAKTKPREEQYNSTYRVVSVLTVLHQDWLNGKEY | TASVVCLLNNFYPREA |
| | | | | SAVYYCAREL | LTISNMQS | KCKVSNKALPAPIEKTISKAKGQPREPQVYTLPPSR | KVQWKVDNALQSGNSQ |
| | | | | GPYYRYSAMV | EDLADYFC | EEMTKNQVSLTCLVKGFYPSDIAVEWESNGQPENNY | ESVTEQDSKDSTYSLS |
| | | | | YWGQGTTVTV | QQYSSYPF | KTTPPVLDSDGSFFLYSKLTVDKSRWQQGNVFSCSV | STLTLSKADYEKHKVY |
| | | | | SS | TFGSGTKL | MHEALHNHYTQKSLSLSPGK | ACEVTHQGLSSPVTKS |
| | | | | | EIK | | FNRGEC |
| | | | | 1289 | 1290 | 1291 | 1292 |
| 39 | CD8B231 | IgG1 | Kappa | EVKLVESGAE | DIQMTQTT | EVKLVESGAELVKPGASVKLSCKASGYTFTNYWMHW | DIQMTQTTSSLSASLG |
| | | | | LVKPGASVKL | SSLSASLG | VKQRPGQGLEWIGNIDPSDSETHYNQKFKDKATLTV | DRVTITCRASQDINIY |
| | | | | SCKASGYTFT | DRVTITCR | DKSSSTAYMQLSSLTSEDSAVYYCASGLTGTGHYWG | LNWYQQKPEGSIKCLI |
| | | | | NYWMHWVKQR | ASQDINIY | QGTTLTVSSASTKGPSVFPLAPSSKSTSGGTAALGC | YHTSRLHSGVPSRFSG |
| | | | | PGQGLEWIGN | LNWYQQKP | LVKDYFPEPVTVSWNSGALTSGVHTFPAVLQSSGLY | SGSGTDYSLTISNLEQ |
| | | | | IDPSDSETHY | EGSIKCLI | SLSSVVTVPSSSLGTQTYICNVNHKPSNTKVDKKVE | EDIATYFCQQDNTLPY |
| | | | | NQKFKDKATL | YHTSRLHS | PKSCDKTHTCPPCPAPELLGGPSVFLFPPKPKDTLM | TFGSGTKLEIKRTVAA |
| | | | | TVDKSSSTAY | GVPSRFSG | ISRTPEVTCVVVDVSHEDPEVKFNWYVDGVEVHNAK | PSVFIFPPSDEQLKSG |
| | | | | MQLSSLTSED | SGSGTDYS | TKPREEQYNSTYRVVSVLTVLHQDWLNGKEYKCKVS | TASVVCLLNNFYPREA |
| | | | | SAVYYCASGL | LTISNLEQ | NKALPAPIEKTISKAKGQPREPQVYTLPPSREEMTK | KVQWKVDNALQSGNSQ |
| | | | | TGTGHYWGQG | EDIATYFC | NQVSLTCLVKGFYPSDIAVEWESNGQPENNYKTTPP | ESVTEQDSKDSTYSLS |
| | | | | TTLTVSS | QQDNTLPY | VLDSDGSFFLYSKLTVDKSRWQQGNVFSCSVMHEAL | STLTLSKADYEKHKVY |
| | | | | | TFGSGTKL | HNHYTQKSLSLSPGK | ACEVTHQGLSSPVTKS |
| | | | | | EIK | | FNRGEC |
| | | | | 1323 | 1324 | 1325 | 1326 |
| 40 | CD8B238 | IgG1 | Kappa | EFQLQQSGPE | DIKMTQSP | EFQLQQSGPELVKPGASLKISCKASGYTFTDYSMDW | DIKMTQSPSSMCPSLG |
| | | | | LVKPGASLKI | SSMCPSLG | VKQSHGKTLEWIGYIYTYSGGAGYNRKFKSKATLTV | ERVTITCKASQDIKSY |
| | | | | SCKASGYTFT | ERVTITCK | DKSSSTAYLELHSLTSDDSAVYYCARDSSDYEFAYW | LSWFQQKPGKSPKTLI |
| | | | | DYSMDWVKQS | ASQDIKSY | GQGTLVTVSAASTKGPSVFPLAPSSKSTSGGTAALG | YRANRLVDGVPSRFSG |
| | | | | HGKTLEWIGY | LSWFQQKP | CLVKDYFPEPVTVSWNSGALTSGVHTFPAVLQSSGL | SGSGQDYSLTISSLEY |
| | | | | IYTYSGGAGY | GKSPKTLI | YSLSSVVTVPSSSLGTQTYICNVNHKPSNTKVDKKV | EDMGIYYCLQYDEFRT |
| | | | | NRKFKSKATL | YRANRLVD | EPKSCDKTHTCPPCPAPELLGGPSVFLFPPKPKDTL | FGGGTKLEIKRTVAAP |
| | | | | TVDKSSSTAY | GVPSRFSG | MISRTPEVTCVVVDVSHEDPEVKFNWYVDGVEVHNA | SVFIFPPSDEQLKSGT |
| | | | | LELHSLTSDD | SGSGQDYS | KTKPREEQYNSTYRVVSVLTVLHQDWLNGKEYKCKV | ASVVCLLNNFYPREAK |
| | | | | SAVYYCARDS | LTISSLEY | SNKALPAPIEKTISKAKGQPREPQVYTLPPSREEMT | VQWKVDNALQSGNSQE |
| | | | | SDYEFAYWGQ | EDMGIYYC | KNQVSLTCLVKGFYPSDIAVEWESNGQPENNYKTTP | SVTEQDSKDSTYSLSS |
| | | | | GTLVTVSA | LQYDEFRT | PVLDSDGSFFLYSKLTVDKSRWQQGNVFSCSVMHEA | TLTLSKADYEKHKVYA |
| | | | | | FGGGTKLE | LHNHYTQKSLSLSPGK | CEVTHQGLSSPVTKSF |
| | | | | | IK | | NRGEC |
| | | | | 1357 | 1358 | 1359 | 1360 |
| 41 | CD8B255 | IgG1 | Kappa | QVTLKESGPG | DIQMTQSP | QVTLKESGPGILQPSQTLSLTCSFSGFSLNTSGMGV | DIQMTQSPASLSVSVG |
| | | | | ILQPSQTLSL | ASLSVSVG | SWIRKPSGKGLEWLAHIFWDDDKRYNPSLKSRLTIS | ETVTITCRASENIYSD |
| | | | | TCSFSGFSLN | ETVTITCR | KDTSSNQVFLMITSVDTADTATYYCARRDGYGDYAY | LAWYQQKQGKSPQLLV |
| | | | | TSGMGVSWIR | ASENIYSD | FDVWGAGTLVTVSAASTKGPSVFPLAPSSKSTSGGT | YAATILTDGVPSRFSG |
| | | | | KPSGKGLEWL | LAWYQQKQ | AALGCLVKDYFPEPVTVSWNSGALTSGVHTFPAVLQ | SGSGTQYSLKINSLQS |
| | | | | AHIFWDDDKR | GKSPQLLV | SSGLYSLSSVVTVPSSSLGTQTYICNVNHKPSNTKV | EDFGNYYCQHFWGTPW |
| | | | | YNPSLKSRLT | YAATILTD | DKKVEPKSCDKTHTCPPCPAPELLGGPSVFLFPPKP | TFGDGTRLEIKRTVAA |
| | | | | ISKDTSSNQV | GVPSRFSG | KDTLMISRTPEVTCVVVDVSHEDPEVKFNWYVDGVE | PSVFIFPPSDEQLKSG |
| | | | | FLMITSVDTA | SGSGTQYS | VHNAKTKPREEQYNSTYRVVSVLTVLHQDWLNGKEY | TASVVCLLNNFYPREA |
| | | | | DTATYYCARR | LKINSLQS | KCKVSNKALPAPIEKTISKAKGQPREPQVYTLPPSR | KVQWKVDNALQSGNSQ |
| | | | | DGYGDYAYFD | EDFGNYYC | EEMTKNQVSLTCLVKGFYPSDIAVEWESNGQPENNY | ESVTEQDSKDSTYSLS |
| | | | | VWGAGTLVTV | QHFWGTPW | KTTPPVLDSDGSFFLYSKLTVDKSRWQQGNVFSCSV | STLTLSKADYEKHKVY |
| | | | | SA | TFGDGTRL | MHEALHNHYTQKSLSLSPGK | ACEVTHQGLSSPVTKS |
| | | | | | EIK | | FNRGEC |
| | | | | 1391 | 1392 | 1393 | 1394 |
| 42 | CD8B324 | IgG1 | Kappa | QVQLQQPGAD | DIVMTQSQ | QVQLQQPGADLVKPGASVKLSCKASGYTSTSHWIHW | DIVMTQSQKFMPTTVG |
| | | | | LVKPGASVKL | KFMPTTVG | VKQRPGQGLEWIGNIYPGSSSTNYNEKFKRMATLTV | DRVSITCKASQNVGTA |
| | | | | SCKASGYTST | DRVSITCK | DTSSSTVYMVLSSLTSDDSAVYYCARHSPGHRDYAM | VAWYQQKPGQSPKLLI |
| | | | | SHWIHWVKQR | ASQNVGTA | DYWGLGTSVTVSSASTKGPSVFPLAPSSKSTSGGTA | ASASNRYTGVPDRFTG |
| | | | | PGQGLEWIGN | VAWYQQKP | ALGCLVKDYFPEPVTVSWNSGALTSGVHTFPAVLQS | SGSGTDFTLTISTMQS |
| | | | | IYPGSSSTNY | GQSPKLLI | SGLYSLSSVVTVPSSSLGTQTYICNVNHKPSNTKVD | EDLADYFCQQYSTYPL |
| | | | | NEKFKRMATL | ASASNRYT | KKVEPKSCDKTHTCPPCPAPELLGGPSVFLFPPKPK | TFGAGTKLEMKRTVAA |
| | | | | TVDTSSSTVY | GVPDRFTG | DTLMISRTPEVTCVVVDVSHEDPEVKFNWYVDGVEV | PSVFIFPPSDEQLKSG |
| | | | | MVLSSLTSDD | SGSGTDFT | HNAKTKPREEQYNSTYRVVSVLTVLHQDWLNGKEYK | TASVVCLLNNFYPREA |
| | | | | SAVYYCARHS | LTISTMQS | CKVSNKALPAPIEKTISKAKGQPREPQVYTLPPSRE | KVQWKVDNALQSGNSQ |
| | | | | PGHRDYAMDY | EDLADYFC | EMTKNQVSLTCLVKGFYPSDIAVEWESNGQPENNYK | ESVTEQDSKDSTYSLS |
| | | | | WGLGTSVTVS | QQYSTYPL | TTPPVLDSDGSFFLYSKLTVDKSRWQQGNVFSCSVM | STLTLSKADYEKHKVY |
| | | | | S | TFGAGTKL | HEALHNHYTQKSLSLSPGK | ACEVTHQGLSSPVTKS |
| | | | | | EMK | | FNRGEC |
| | | | | 1425 | 1426 | 1427 | 1428 |
| 43 | CD8B337 | IgG1 | Kappa | QVTLKESGPG | DIQMTQYP | QVTLKESGPGKVQPSQTLSLTCSFSGFSLSTSGMGV | DIQMTQYPASLSVSVG |
| | | | | KVQPSQTLSL | ASLSVSVG | SWIRKPSGKGLEWLAHIFWDDDRRYKSSLKSRLTIS | ETVTITCRASENIYSD |
| | | | | TCSFSGFSLS | ETVTITCR | KDTSSNQVFLMITSVDTADSATYYCARRVGYGDYAY | LAWYQQKQGKSPQLLV |
| | | | | TSGMGVSWIR | ASENIYSD | FDVWGAGTTVTVSSASTKGPSVFPLAPSSKSTSGGT | YAATNLADGVPSRFSG |
| | | | | KPSGKGLEWL | LAWYQQKQ | AALGCLVKDYFPEPVTVSWNSGALTSGVHTFPAVLQ | SGSGTQYSLKINSLQS |
| | | | | AHIFWDDDRR | GKSPQLLV | SSGLYSLSSVVTVPSSSLGTQTYICNVNHKPSNTKV | EDFGNYYCQHFWGTPW |
| | | | | YKSSLKSRLT | YAATNLAD | DKKVEPKSCDKTHTCPPCPAPELLGGPSVFLFPPKP | TFGGGTKLEIKRTVAA |
| | | | | ISKDTSSNQV | GVPSRFSG | KDTLMISRTPEVTCVVVDVSHEDPEVKFNWYVDGVE | PSVFIFPPSDEQLKSG |
| | | | | FLMITSVDTA | SGSGTQYS | VHNAKTKPREEQYNSTYRVVSVLTVLHQDWLNGKEY | TASVVCLLNNFYPREA |
| | | | | DSATYYCARR | LKINSLQS | KCKVSNKALPAPIEKTISKAKGQPREPQVYTLPPSR | KVQWKVDNALQSGNSQ |
| | | | | VGYGDYAYFD | EDFGNYYC | EEMTKNQVSLTCLVKGFYPSDIAVEWESNGQPENNY | ESVTEQDSKDSTYSLS |
| | | | | VWGAGTTVTV | QHFWGTPW | KTTPPVLDSDGSFFLYSKLTVDKSRWQQGNVFSCSV | STLTLSKADYEKHKVY |
| | | | | SS | TFGGGTKL | MHEALHNHYTQKSLSLSPGK | ACEVTHQGLSSPVTKS |
| | | | | | EIK | | FNRGEC |
| | | | | 1459 | 1460 | 1461 | 1462 |
| 44 | CD8B344 | IgG1 | Kappa | QVQLQQSGAE | DIKMTQSQ | QVQLQQSGAELVKPGASVKLSCKASGYSFTNYWINW | DIKMTQSQKFMSTTVG |
| | | | | LVKPGASVKL | KFMSTTVG | MKQRPGQGLEWIGNIYPGSDSSNYNEKFKTKATLTV | DRVSITCKASQNVGTA |
| | | | | SCKASGYSFT | DRVSITCK | DTSSSTAYMQLSSLTSDDSAVYYCAREEADYRYTWF | VAWYQQKPGQSPKLLI |
| | | | | NYWINWMKQR | ASQNVGTA | VYWGQGTLVTVSAASTKGPSVFPLAPSSKSTSGGTA | YSASNRYTGVPDRFTG |
| | | | | PGQGLEWIGN | VAWYQQKP | ALGCLVKDYFPEPVTVSWNSGALTSGVHTFPAVLQS | SGSGTDFTLTFSNMQS |
| | | | | IYPGSDSSNY | GQSPKLLI | SGLYSLSSVVTVPSSSLGTQTYICNVNHKPSNTKVD | EDLADYFCQQYSSYPL |
| | | | | NEKFKTKATL | YSASNRYT | KKVEPKSCDKTHTCPPCPAPELLGGPSVFLFPPKPK | TFGAGTKLEMKRTVAA |
| | | | | TVDTSSSTAY | GVPDRFTG | DTLMISRTPEVTCVVVDVSHEDPEVKFNWYVDGVEV | PSVFIFPPSDEQLKSG |
| | | | | MQLSSLTSDD | SGSGTDFT | HNAKTKPREEQYNSTYRVVSVLTVLHQDWLNGKEYK | TASVVCLLNNFYPREA |
| | | | | SAVYYCAREE | LTFSNMQS | CKVSNKALPAPIEKTISKAKGQPREPQVYTLPPSRE | KVQWKVDNALQSGNSQ |
| | | | | ADYRYTWFVY | EDLADYFC | EMTKNQVSLTCLVKGFYPSDIAVEWESNGQPENNYK | ESVTEQDSKDSTYSLS |
| | | | | WGQGTLVTVS | QQYSSYPL | TTPPVLDSDGSFFLYSKLTVDKSRWQQGNVFSCSVM | STLTLSKADYEKHKVY |
| | | | | A | TFGAGTKL | HEALHNHYTQKSLSLSPGK | ACEVTHQGLSSPVTKS |
| | | | | | EMK | | FNRGEC |
| | | | | 1493 | 1494 | 1495 | 1496 |
| 45 | CD8B264 | IgG1 | Kappa | EVQLQQSGTE | DIVMTQSQ | EVQLQQSGTELVKPGASVKLSCKASGYSFTSYWINW | DIVMTQSQKFMSTTVG |
| | | | | LVKPGASVKL | KFMSTTVG | VKQRPGQGPEWIGNIYPGSSSTNYNEKFKNKATLTV | DRVSITCKASQNVGTA |
| | | | | SCKASGYSFT | DRVSITCK | DTSSSTAYMQLSSLTSDDSAVYYCAREEYSYKSSWF | VAWYQQKPGQSPKLLI |
| | | | | SYWINWVKQR | ASQNVGTA | AYWGQGTLVTVSAASTKGPSVFPLAPSSKSTSGGTA | YSASNRYNGVPDRFTG |
| | | | | PGQGPEWIGN | VAWYQQKP | ALGCLVKDYFPEPVTVSWNSGALTSGVHTFPAVLQS | SGSGTDFTLTISNMQS |
| | | | | IYPGSSSTNY | GQSPKLLI | SGLYSLSSVVTVPSSSLGTQTYICNVNHKPSNTKVD | EDLADYFCQQYSTYPY |
| | | | | NEKFKNKATL | YSASNRYN | KKVEPKSCDKTHTCPPCPAPELLGGPSVFLFPPKPK | TFGSGTKLEIKRTVAA |
| | | | | TVDTSSSTAY | GVPDRFTG | DTLMISRTPEVTCVVVDVSHEDPEVKFNWYVDGVEV | PSVFIFPPSDEQLKSG |
| | | | | MQLSSLTSDD | SGSGTDFT | HNAKTKPREEQYNSTYRVVSVLTVLHQDWLNGKEYK | TASVVCLLNNFYPREA |
| | | | | SAVYYCAREE | LTISNMQS | CKVSNKALPAPIEKTISKAKGQPREPQVYTLPPSRE | KVQWKVDNALQSGNSQ |
| | | | | YSYKSSWFAY | EDLADYFC | EMTKNQVSLTCLVKGFYPSDIAVEWESNGQPENNYK | ESVTEQDSKDSTYSLS |
| | | | | WGQGTLVTVS | QQYSTYPY | TTPPVLDSDGSFFLYSKLTVDKSRWQQGNVFSCSVM | STLTLSKADYEKHKVY |
| | | | | A | TFGSGTKL | HEALHNHYTQKSLSLSPGK | ACEVTHQGLSSPVTKS |
| | | | | | EIK | | FNRGEC |
| | | | | 1527 | 1528 | 1529 | 1530 |
| 46 | CD8B318 | IgG1 | Kappa | EVQLQQSGAE | DIVMTQSQ | EVQLQQSGAELVKPGASVKLSCKASGYTFTSYWISW | DIVMTQSQKFMSTTIG |
| | | | | LVKPGASVKL | KFMSTTIG | VKQRPGQGLEWIGNIYPGSSSSNYNENFKSKATLTV | DRVSITCKASQNVGTA |
| | | | | SCKASGYTFT | DRVSITCK | DTSSSTAHMQLSSLTSDDSAVFYCAREEYSYFPSWF | VAWFQQKPGQSPKLLI |
| | | | | SYWISWVKQR | ASQNVGTA | AYWGQGTSVTVSSASTKGPSVFPLAPSSKSTSGGTA | YSASNRYTGVPDRFTG |
| | | | | PGQGLEWIGN | VAWFQQKP | ALGCLVKDYFPEPVTVSWNSGALTSGVHTFPAVLQS | SGSGTDFTLTISNMQS |
| | | | | IYPGSSSSNY | GQSPKLLI | SGLYSLSSVVTVPSSSLGTQTYICNVNHKPSNTKVD | EDLANYFCQQYSTYPF |
| | | | | NENFKSKATL | YSASNRYT | KKVEPKSCDKTHTCPPCPAPELLGGPSVFLFPPKPK | TFGGGTKLEIKRTVAA |
| | | | | TVDTSSSTAH | GVPDRFTG | DTLMISRTPEVTCVVVDVSHEDPEVKFNWYVDGVEV | PSVFIFPPSDEQLKSG |
| | | | | MQLSSLTSDD | SGSGTDFT | HNAKTKPREEQYNSTYRVVSVLTVLHQDWLNGKEYK | TASVVCLLNNFYPREA |
| | | | | SAVFYCAREE | LTISNMQS | CKVSNKALPAPIEKTISKAKGQPREPQVYTLPPSRE | KVQWKVDNALQSGNSQ |
| | | | | YSYFPSWFAY | EDLANYFC | EMTKNQVSLTCLVKGFYPSDIAVEWESNGQPENNYK | ESVTEQDSKDSTYSLS |
| | | | | WGQGTSVTVS | QQYSTYPF | TTPPVLDSDGSFFLYSKLTVDKSRWQQGNVFSCSVM | STLTLSKADYEKHKVY |
| | | | | S | TFGGGTKL | HEALHNHYTQKSLSLSPGK | ACEVTHQGLSSPVTKS |
| | | | | | EIK | | FNRGEC |
| | | | | 1561 | 1562 | 1563 | 1564 |
| 47 | CD8B333 | IgG1 | Kappa | QVQLQQPGTE | DIVMTQSQ | QVQLQQPGTELVKPGASVKLSCKASGYSFASFWINW | DIVMTQSQKFMSTTVG |
| | | | | LVKPGASVKL | KFMSTTVG | VKQRPGQGPEWIGNIYPGSSSTNYSEKFKNKATLTV | DRVSITCKASQNVGTA |
| | | | | SCKASGYSFA | DRVSITCK | DKSSSTAYMQLSSLTSDDSAVYYCAREEYSYKSSWF | VAWYQQKPGQSPKLLI |
| | | | | SFWINWVKQR | ASQNVGTA | AYWGQGTTVTVSSASTKGPSVFPLAPSSKSTSGGTA | YSASNRYNGVPDRFTG |
| | | | | PGQGPEWIGN | VAWYQQKP | ALGCLVKDYFPEPVTVSWNSGALTSGVHTFPAVLQS | SGSGTDFTLTISNMQS |
| | | | | IYPGSSSTNY | GQSPKLLI | SGLYSLSSVVTVPSSSLGTQTYICNVNHKPSNTKVD | EDLADYFCQQYSTYPY |
| | | | | SEKFKNKATL | YSASNRYN | KKVEPKSCDKTHTCPPCPAPELLGGPSVFLFPPKPK | TFGSGTKLELKRTVAA |
| | | | | TVDKSSSTAY | GVPDRFTG | DTLMISRTPEVTCVVVDVSHEDPEVKFNWYVDGVEV | PSVFIFPPSDEQLKSG |
| | | | | MQLSSLTSDD | SGSGTDFT | HNAKTKPREEQYNSTYRVVSVLTVLHQDWLNGKEYK | TASVVCLLNNFYPREA |
| | | | | SAVYYCAREE | LTISNMQS | CKVSNKALPAPIEKTISKAKGQPREPQVYTLPPSRE | KVQWKVDNALQSGNSQ |
| | | | | YSYKSSWFAY | EDLADYFC | EMTKNQVSLTCLVKGFYPSDIAVEWESNGQPENNYK | ESVTEQDSKDSTYSLS |
| | | | | WGQGTTVTVS | QQYSTYPY | TTPPVLDSDGSFFLYSKLTVDKSRWQQGNVFSCSVM | STLTLSKADYEKHKVY |
| | | | | S | TFGSGTKL | HEALHNHYTQKSLSLSPGK | ACEVTHQGLSSPVTKS |
| | | | | | ELK | | FNRGEC |
| | | | | 1595 | 1596 | 1597 | 1598 |
| 48 | CD8B366 | IgG1 | Kappa | EVQLQQSGPE | DIKMTQSP | EVQLQQSGPELVRPGASVKLSCTASGFNIKDDYIHW | DIKMTQSPSYLAASPG |
| | | | | LVRPGASVKL | SYLAASPG | VKQRPEQGLEWIGRIDPANGNPRYAPKFQDKATLTA | ETITINCRASKSISKY |
| | | | | SCTASGFNIK | ETITINCR | DTSSNTAYLQLSSLTSEDTAVYYCARDDEGYYYFDV | LAWYQEKPGKTNKVLI |
| | | | | DDYIHWVKQR | ASKSISKY | WGAGTSVTVSSASTKGPSVFPLAPSSKSTSGGTAAL | YSGSTLQSGIPSRFSG |
| | | | | PEQGLEWIGR | LAWYQEKP | GCLVKDYFPEPVTVSWNSGALTSGVHTFPAVLQSSG | SGSGTDFTLTISSLEP |
| | | | | IDPANGNPRY | GKTNKVLI | LYSLSSVVTVPSSSLGTQTYICNVNHKPSNTKVDKK | EDFAIYYCQQHNEYPL |
| | | | | APKFQDKATL | YSGSTLQS | VEPKSCDKTHTCPPCPAPELLGGPSVFLFPPKPKDT | TFGDGTRLEIKRTVAA |
| | | | | TADTSSNTAY | GIPSRFSG | LMISRTPEVTCVVVDVSHEDPEVKFNWYVDGVEVHN | PSVFIFPPSDEQLKSG |
| | | | | LQLSSLTSED | SGSGTDFT | AKTKPREEQYNSTYRVVSVLTVLHQDWLNGKEYKCK | TASVVCLLNNFYPREA |
| | | | | TAVYYCARDD | LTISSLEP | VSNKALPAPIEKTISKAKGQPREPQVYTLPPSREEM | KVQWKVDNALQSGNSQ |
| | | | | EGYYYFDVWG | EDFAIYYC | TKNQVSLTCLVKGFYPSDIAVEWESNGQPENNYKTT | ESVTEQDSKDSTYSLS |
| | | | | AGTSVTVSS | QQHNEYPL | PPVLDSDGSFFLYSKLTVDKSRWQQGNVFSCSVMHE | STLTLSKADYEKHKVY |
| | | | | | TFGDGTRL | ALHNHYTQKSLSLSPGK | ACEVTHQGLSSPVTKS |
| | | | | | EIK | | FNRGEC |
| | | | | 1629 | 1630 | 1631 | 1632 |
| 49 | CD8B368 | IgG1 | Kappa | QVQLQQPGTE | DIVMTQSQ | QVQLQQPGTELVKPGASVKLSCKASGYTFTSYWINW | DIVMTQSQKFMSTTVG |
| | | | | LVKPGASVKL | KFMSTTVG | MKQRPGQGLEWIGNIYPFSSSTNYNEKFKKKATLTV | DRVSITCKASQNVGIA |
| | | | | SCKASGYTFT | DRVSITCK | DASSSTASMQLSSLTSDDSAVYFCAREEFSHYPSWF | VAWFQQKPGQSPKLLI |
| | | | | SYWINWMKQR | ASQNVGIA | AYWGQGTTLTVSSASTKGPSVFPLAPSSKSTSGGTA | YSASNRYTGVPDRFTG |
| | | | | PGQGLEWIGN | VAWFQQKP | ALGCLVKDYFPEPVTVSWNSGALTSGVHTFPAVLQS | SGSGTDFTLTIGNMQS |
| | | | | IYPFSSSTNY | GQSPKLLI | SGLYSLSSVVTVPSSSLGTQTYICNVNHKPSNTKVD | EDLADYFCQQYSTDPY |
| | | | | NEKFKKKATL | YSASNRYT | KKVEPKSCDKTHTCPPCPAPELLGGPSVFLFPPKPK | TFGSGTKLEIKRTVAA |
| | | | | TVDASSSTAS | GVPDRFTG | DTLMISRTPEVTCVVVDVSHEDPEVKFNWYVDGVEV | PSVFIFPPSDEQLKSG |
| | | | | MQLSSLTSDD | SGSGTDFT | HNAKTKPREEQYNSTYRVVSVLTVLHQDWLNGKEYK | TASVVCLLNNFYPREA |
| | | | | SAVYFCAREE | LTIGNMQS | CKVSNKALPAPIEKTISKAKGQPREPQVYTLPPSRE | KVQWKVDNALQSGNSQ |
| | | | | FSHYPSWFAY | EDLADYFC | EMTKNQVSLTCLVKGFYPSDIAVEWESNGQPENNYK | ESVTEQDSKDSTYSLS |
| | | | | WGQGTTLTVS | QQYSTDPY | TTPPVLDSDGSFFLYSKLTVDKSRWQQGNVFSCSVM | STLTLSKADYEKHKVY |
| | | | | S | TFGSGTKL | HEALHNHYTQKSLSLSPGK | ACEVTHQGLSSPVTKS |
| | | | | | EIK | | FNRGEC |
| | | | | 1663 | 1664 | 1665 | 1666 |
| 50 | CD8B370 | IgG1 | Kappa | EVQLQQSGAE | DIVLTQSQ | EVQLQQSGAELVKPGASVKLSCKASGYTFTSYWINW | DIVLTQSQKIMSTTVG |
| | | | | LVKPGASVKL | KIMSTTVG | VKQRPGQGLEWIGNIYPGSSSTNYNEKFKNKATLTV | DRVSITCKASQNVGTA |
| | | | | SCKASGYTFT | DRVSITCK | DTSSSTVYMQLSSLTSDDSAVYYCTRELGAYYHYSA | VAWYQQKPGQSPKLLI |
| | | | | SYWINWVKQR | ASQNVGTA | MDYWGQGTSVTVSSASTKGPSVFPLAPSSKSTSGGT | YSASNRYTGVPDRFTG |
| | | | | PGQGLEWIGN | VAWYQQKP | AALGCLVKDYFPEPVTVSWNSGALTSGVHTFPAVLQ | SGSGTDFTLTISNMQS |
| | | | | IYPGSSSTNY | GQSPKLLI | SSGLYSLSSVVTVPSSSLGTQTYICNVNHKPSNTKV | EDLADYFCQQYSIYPF |
| | | | | NEKFKNKATL | YSASNRYT | DKKVEPKSCDKTHTCPPCPAPELLGGPSVFLFPPKP | TFGSGTKLEIKRTVAA |
| | | | | TVDTSSSTVY | GVPDRFTG | KDTLMISRTPEVTCVVVDVSHEDPEVKFNWYVDGVE | PSVFIFPPSDEQLKSG |
| | | | | MQLSSLTSDD | SGSGTDFT | VHNAKTKPREEQYNSTYRVVSVLTVLHQDWLNGKEY | TASVVCLLNNFYPREA |
| | | | | SAVYYCTREL | LTISNMQS | KCKVSNKALPAPIEKTISKAKGQPREPQVYTLPPSR | KVQWKVDNALQSGNSQ |
| | | | | GAYYHYSAMD | EDLADYFC | EEMTKNQVSLTCLVKGFYPSDIAVEWESNGQPENNY | ESVTEQDSKDSTYSLS |
| | | | | YWGQGTSVTV | QQYSIYPF | KTTPPVLDSDGSFFLYSKLTVDKSRWQQGNVFSCSV | STLTLSKADYEKHKVY |
| | | | | SS | TFGSGTKL | MHEALHNHYTQKSLSLSPGK | ACEVTHQGLSSPVTKS |
| | | | | | EIK | | FNRGEC |
| | | | | 1697 | 1698 | 1699 | 1700 |
| 51 | CD8B186 | IgG1 | Kappa | QVQLQQSGAE | DVQMIQSP | QVQLQQSGAELAKPGASVKMSCKASGYIFTSYWMHW | DVQMIQSPASLSASVG |
| | | | | LAKPGASVKM | ASLSASVG | VKQRPGQGLEWIGNINPSSGYAVYNQKFKDKATLTA | ETVTITCRASGNIHNY |
| | | | | SCKASGYIFT | ETVTITCR | DQSSSTAYIQLNSLTSEDSAVYYCARRVFYGDSWFA | LAWYQQKQGKSPQLLV |
| | | | | SYWMHWVKQR | ASGNIHNY | YWGQGTSVTVSSASTKGPSVFPLAPSSKSTSGGTAA | YNAKTLADGVPSRFSG |
| | | | | PGQGLEWIGN | LAWYQQKQ | LGCLVKDYFPEPVTVSWNSGALTSGVHTFPAVLQSS | SGSGTQYSLKINSLQP |
| | | | | INPSSGYAVY | GKSPQLLV | GLYSLSSVVTVPSSSLGTQTYICNVNHKPSNTKVDK | EDFGSYYCQHFWSTTW |
| | | | | NQKFKDKATL | YNAKTLAD | KVEPKSCDKTHTCPPCPAPELLGGPSVFLFPPKPKD | TFGGGTKLEIKRTVAA |
| | | | | TADQSSSTAY | GVPSRFSG | TLMISRTPEVTCVVVDVSHEDPEVKFNWYVDGVEVH | PSVFIFPPSDEQLKSG |
| | | | | IQLNSLTSED | SGSGTQYS | NAKTKPREEQYNSTYRVVSVLTVLHQDWLNGKEYKC | TASVVCLLNNFYPREA |
| | | | | SAVYYCARRV | LKINSLQP | KVSNKALPAPIEKTISKAKGQPREPQVYTLPPSREE | KVQWKVDNALQSGNSQ |
| | | | | FYGDSWFAYW | EDFGSYYC | MTKNQVSLTCLVKGFYPSDIAVEWESNGQPENNYKT | ESVTEQDSKDSTYSLS |
| | | | | GQGTSVTVSS | QHFWSTTW | TPPVLDSDGSFFLYSKLTVDKSRWQQGNVFSCSVMH | STLTLSKADYEKHKVY |
| | | | | | TFGGGTKL | EALHNHYTQKSLSLSPGK | ACEVTHQGLSSPVTKS |
| | | | | | EIK | | FNRGEC |
| | | | | 1731 | 1732 | 1733 | 1734 |
| 52 | CD8B190 | IgG1 | Kappa | EFQLQQSGPE | NTQMNQTP | EFQLQQSGPELMKPGASVKISCKASGYSFTSYYMHW | NTQMNQTPSSLSASLG |
| | | | | LMKPGASVKI | SSLSASLG | MKQSHGKSLEWIGYIDPFNGNTNYKQKFKGKATLTV | DTVTITCHASQNINVW |
| | | | | SCKASGYSFT | DTVTITCH | DKSSSTAYMHLSSLTSEDSAVYYCASPNSNYVGTWF | LSWYQQKPGNIPKLLI |
| | | | | SYYMHWMKQS | ASQNINVW | AYWGQGTTVTVSSASTKGPSVFPLAPSSKSTSGGTA | YKASNLHTGVPSRFSG |
| | | | | HGKSLEWIGY | LSWYQQKP | ALGCLVKDYFPEPVTVSWNSGALTSGVHTFPAVLQS | SGSGTGFTLTISSLQP |
| | | | | IDPFNGNTNY | GNIPKLLI | SGLYSLSSVVTVPSSSLGTQTYICNVNHKPSNTKVD | DDIATYYCQQGQSFPF |
| | | | | KQKFKGKATL | YKASNLHT | KKVEPKSCDKTHTCPPCPAPELLGGPSVFLFPPKPK | TFGSGTKLEIKRTVAA |
| | | | | TVDKSSSTAY | GVPSRFSG | DTLMISRTPEVTCVVVDVSHEDPEVKFNWYVDGVEV | PSVFIFPPSDEQLKSG |
| | | | | MHLSSLTSED | SGSGTGFT | HNAKTKPREEQYNSTYRVVSVLTVLHQDWLNGKEYK | TASVVCLLNNFYPREA |
| | | | | SAVYYCASPN | LTISSLQP | CKVSNKALPAPIEKTISKAKGQPREPQVYTLPPSRE | KVQWKVDNALQSGNSQ |
| | | | | SNYVGTWFAY | DDIATYYC | EMTKNQVSLTCLVKGFYPSDIAVEWESNGQPENNYK | ESVTEQDSKDSTYSLS |
| | | | | WGQGTTVTVS | QQGQSFPF | TTPPVLDSDGSFFLYSKLTVDKSRWQQGNVFSCSVM | STLTLSKADYEKHKVY |
| | | | | S | TFGSGTKL | HEALHNHYTQKSLSLSPGK | ACEVTHQGLSSPVTKS |
| | | | | | EIK | | FNRGEC |
| | | | | 1765 | 1766 | 1767 | 1768 |
| 53 | CD8B192 | IgG1 | Kappa | QVQLQQSGPV | DIQMTQSP | QVQLQQSGPVLVKPGASVKMSCKASGYTFTDYYMNW | DIQMTQSPASLSASVG |
| | | | | LVKPGASVKM | ASLSASVG | VMQSHGKSLEWIGVINPYNGGTTYNQRFTGKATLTV | ETVTITCRASGNIHNY |
| | | | | SCKASGYTFT | ETVTITCR | DKSSSTAYMELNSLTSEDSAVYYCARNYGAMDSWGQ | LAWYQQKQGKSPQLLV |
| | | | | DYYMNWVMQS | ASGNIHNY | GTSVTVSSASTKGPSVFPLAPSSKSTSGGTAALGCL | SNAKTLADGVPSRFGG |
| | | | | HGKSLEWIGV | LAWYQQKQ | VKDYFPEPVTVSWNSGALTSGVHTFPAVLQSSGLYS | SGSGTQYSLKINSLQP |
| | | | | INPYNGGTTY | GKSPQLLV | LSSVVTVPSSSLGTQTYICNVNHKPSNTKVDKKVEP | EDFGSYYCQHFWITPP |
| | | | | NQRFTGKATL | SNAKTLAD | KSCDKTHTCPPCPAPELLGGPSVFLFPPKPKDTLMI | TFGAGTRLEIKRTVAA |
| | | | | TVDKSSSTAY | GVPSRFGG | SRTPEVTCVVVDVSHEDPEVKFNWYVDGVEVHNAKT | PSVFIFPPSDEQLKSG |
| | | | | MELNSLTSED | SGSGTQYS | KPREEQYNSTYRVVSVLTVLHQDWLNGKEYKCKVSN | TASVVCLLNNFYPREA |
| | | | | SAVYYCARNY | LKINSLQP | KALPAPIEKTISKAKGQPREPQVYTLPPSREEMTKN | KVQWKVDNALQSGNSQ |
| | | | | GAMDSWGQGT | EDFGSYYC | QVSLTCLVKGFYPSDIAVEWESNGQPENNYKTTPPV | ESVTEQDSKDSTYSLS |
| | | | | SVTVSS | QHFWITPP | LDSDGSFFLYSKLTVDKSRWQQGNVFSCSVMHEALH | STLTLSKADYEKHKVY |
| | | | | | TFGAGTRL | NHYTQKSLSLSPGK | ACEVTHQGLSSPVTKS |
| | | | | | EIK | | FNRGEC |
| | | | | 1799 | 1800 | 1801 | 1802 |
| 54 | CD8B193 | IgG1 | Kappa | DVQLQESGPE | DIVMTQSQ | DVQLQESGPELVKPGASVKIACKTSGYKFTDYYMNW | DIVMTQSQKFMSTTVG |
| | | | | LVKPGASVKI | KFMSTTVG | VKQSLGKSLDWIGDINPNGGGTSDNPKFKGKATLTV | DRVSITCKASQNVGTA |
| | | | | ACKTSGYKFT | DRVSITCK | DKSSSTAYMELRSLTSEDSGVYYCARTSGTDWYFDV | VAWYQQKPGQSPKLLI |
| | | | | DYYMNWVKQS | ASQNVGTA | WGTGTTVTVSSASTKGPSVFPLAPSSKSTSGGTAAL | YSASNRYTGVPDRFTG |
| | | | | LGKSLDWIGD | VAWYQQKP | GCLVKDYFPEPVTVSWNSGALTSGVHTFPAVLQSSG | SGSGTDFTLTISNMQS |
| | | | | INPNGGGTSD | GQSPKLLI | LYSLSSVVTVPSSSLGTQTYICNVNHKPSNTKVDKK | EDLADYFCQQYSSYPF |
| | | | | NPKFKGKATL | YSASNRYT | VEPKSCDKTHTCPPCPAPELLGGPSVFLFPPKPKDT | TFGSGTKLEMKRTVAA |
| | | | | TVDKSSSTAY | GVPDRFTG | LMISRTPEVTCVVVDVSHEDPEVKFNWYVDGVEVHN | PSVFIFPPSDEQLKSG |
| | | | | MELRSLTSED | SGSGTDFT | AKTKPREEQYNSTYRVVSVLTVLHQDWLNGKEYKCK | TASVVCLLNNFYPREA |
| | | | | SGVYYCARTS | LTISNMQS | VSNKALPAPIEKTISKAKGQPREPQVYTLPPSREEM | KVQWKVDNALQSGNSQ |
| | | | | GTDWYFDVWG | EDLADYFC | TKNQVSLTCLVKGFYPSDIAVEWESNGQPENNYKTT | ESVTEQDSKDSTYSLS |
| | | | | TGTTVTVSS | QQYSSYPF | PPVLDSDGSFFLYSKLTVDKSRWQQGNVFSCSVMHE | STLTLSKADYEKHKVY |
| | | | | | TFGSGTKL | ALHNHYTQKSLSLSPGK | ACEVTHQGLSSPVTKS |
| | | | | | EMK | | FNRGEC |
| | | | | 1833 | 1834 | 1835 | 1836 |
| 55 | CD8B214 | IgG1 | Kappa | QVQLQQSGPE | DIQMTQTT | QVQLQQSGPELKKPGETVKISCKASGYTFTTAGIQW | DIQMTQTTSSLSASLG |
| | | | | LKKPGETVKI | SSLSASLG | VQKMPGKGFKWIGWINTHAGESKYADDFKGRFAVSL | DRVTITCRASQDIRPY |
| | | | | SCKASGYTFT | DRVTITCR | ETSASTAYLQISNLKNEDTATYFCARSGDYDGSHPF | LNWYQQKPEGTIKLLI |
| | | | | TAGIQWVQKM | ASQDIRPY | AYWGQGTSVTVSSASTKGPSVFPLAPSSKSTSGGTA | YYTSRLHSGVPSRFSG |
| | | | | PGKGFKWIGW | LNWYQQKP | ALGCLVKDYFPEPVTVSWNSGALTSGVHTFPAVLQS | SGSGTDYSLTISNLEQ |
| | | | | INTHAGESKY | EGTIKLLI | SGLYSLSSVVTVPSSSLGTQTYICNVNHKPSNTKVD | EDIATYFCQQDNTLPY |
| | | | | ADDFKGRFAV | YYTSRLHS | KKVEPKSCDKTHTCPPCPAPELLGGPSVFLFPPKPK | TFGSGTKLEIKRTVAA |
| | | | | SLETSASTAY | GVPSRFSG | DTLMISRTPEVTCVVVDVSHEDPEVKFNWYVDGVEV | PSVFIFPPSDEQLKSG |
| | | | | LQISNLKNED | SGSGTDYS | HNAKTKPREEQYNSTYRVVSVLTVLHQDWLNGKEYK | TASVVCLLNNFYPREA |
| | | | | TATYFCARSG | LTISNLEQ | CKVSNKALPAPIEKTISKAKGQPREPQVYTLPPSRE | KVQWKVDNALQSGNSQ |
| | | | | DYDGSHPFAY | EDIATYFC | EMTKNQVSLTCLVKGFYPSDIAVEWESNGQPENNYK | ESVTEQDSKDSTYSLS |
| | | | | WGQGTSVTVS | QQDNTLPY | TTPPVLDSDGSFFLYSKLTVDKSRWQQGNVFSCSVM | STLTLSKADYEKHKVY |
| | | | | S | TFGSGTKL | HEALHNHYTQKSLSLSPGK | ACEVTHQGLSSPVTKS |
| | | | | | EIK | | FNRGEC |
| | | | | 1867 | 1868 | 1869 | 1870 |
| 56 | CD8B230 | IgG1 | Kappa | QIQLVQSGPE | DIVMTQSQ | QIQLVQSGPELVKPGASVKISCKASGYTFTDYYMNW | DIVMTQSQKFMSTTVG |
| | | | | LVKPGASVKI | KFMSTTVG | VKQSHGKSLDWIGDINPNGGGTSDNPKFKGKATLTV | DRVSITCKASQNVGTA |
| | | | | SCKASGYTFT | DRVSITCK | DKSSNTAYMELRSLTSEDSAVYYCARTSGTDWYFDV | VAWYQQKPGQSPKLLI |
| | | | | DYYMNWVKQS | ASQNVGTA | WGTGTLVTVSAASTKGPSVFPLAPSSKSTSGGTAAL | YSTSNRYTGVPDRFTG |
| | | | | HGKSLDWIGD | VAWYQQKP | GCLVKDYFPEPVTVSWNSGALTSGVHTFPAVLQSSG | SGSGTDFTLTISNMQS |
| | | | | INPNGGGTSD | GQSPKLLI | LYSLSSVVTVPSSSLGTQTYICNVNHKPSNTKVDKK | EDLADYFCQQYSIYPF |
| | | | | NPKFKGKATL | YSTSNRYT | VEPKSCDKTHTCPPCPAPELLGGPSVFLFPPKPKDT | TFGSGTKLEMKRTVAA |
| | | | | TVDKSSNTAY | GVPDRFTG | LMISRTPEVTCVVVDVSHEDPEVKFNWYVDGVEVHN | PSVFIFPPSDEQLKSG |
| | | | | MELRSLTSED | SGSGTDFT | AKTKPREEQYNSTYRVVSVLTVLHQDWLNGKEYKCK | TASVVCLLNNFYPREA |
| | | | | SAVYYCARTS | LTISNMQS | VSNKALPAPIEKTISKAKGQPREPQVYTLPPSREEM | KVQWKVDNALQSGNSQ |
| | | | | GTDWYFDVWG | EDLADYFC | TKNQVSLTCLVKGFYPSDIAVEWESNGQPENNYKTT | ESVTEQDSKDSTYSLS |
| | | | | TGTLVTVSA | QQYSIYPF | PPVLDSDGSFFLYSKLTVDKSRWQQGNVFSCSVMHE | STLTLSKADYEKHKVY |
| | | | | | TFGSGTKL | ALHNHYTQKSLSLSPGK | ACEVTHQGLSSPVTKS |
| | | | | | EMK | | FNRGEC |
| | | | | 1901 | 1902 | 1903 | 1904 |
| 57 | CD8B245 | IgG1 | Kappa | EFQLQQSGGG | DIQMTQSP | EFQLQQSGGGLVQPGGSLSLSCAAPGFTFTDYYMSW | DIQMTQSPASLSASVG |
| | | | | LVQPGGSLSL | ASLSASVG | VRQSPGKALEWLALSRNKGNGYTTEYSASVKGRFTI | ETVTITCRASENIYSY |
| | | | | SCAAPGFTFT | ETVTITCR | SRDNSQSILYLQMNVLRAEDSATYYCARTVTGTLFY | LAWYQQKQGKSPQFLV |
| | | | | DYYMSWVRQS | ASENIYSY | YALDYWGQGTTVTVSSASTKGPSVFPLAPSSKSTSG | YNAKTLAAGVPSRFSG |
| | | | | PGKALEWLAL | LAWYQQKQ | GTAALGCLVKDYFPEPVTVSWNSGALTSGVHTFPAV | SGSGTQFSLKINRLQP |
| | | | | SRNKGNGYTT | GKSPQFLV | LQSSGLYSLSSVVTVPSSSLGTQTYICNVNHKPSNT | EDFGTYYCQHHYGTPL |
| | | | | EYSASVKGRF | YNAKTLAA | KVDKKVEPKSCDKTHTCPPCPAPELLGGPSVFLFPP | TFGDGTRLEIKRTVAA |
| | | | | TISRDNSQSI | GVPSRFSG | KPKDTLMISRTPEVTCVVVDVSHEDPEVKFNWYVDG | PSVFIFPPSDEQLKSG |
| | | | | LYLQMNVLRA | SGSGTQFS | VEVHNAKTKPREEQYNSTYRVVSVLTVLHQDWLNGK | TASVVCLLNNFYPREA |
| | | | | EDSATYYCAR | LKINRLQP | EYKCKVSNKALPAPIEKTISKAKGQPREPQVYTLPP | KVQWKVDNALQSGNSQ |
| | | | | TVTGTLFYYA | EDFGTYYC | SREEMTKNQVSLTCLVKGFYPSDIAVEWESNGQPEN | ESVTEQDSKDSTYSLS |
| | | | | LDYWGQGTTV | QHHYGTPL | NYKTTPPVLDSDGSFFLYSKLTVDKSRWQQGNVFSC | STLTLSKADYEKHKVY |
| | | | | TVSS | TFGDGTRL | SVMHEALHNHYTQKSLSLSPGK | ACEVTHQGLSSPVTKS |
| | | | | | EIK | | FNRGEC |
| | | | | 1935 | 1936 | 1937 | 1938 |
| 58 | CD8B248 | IgG1 | Kappa | EVQLQQSGAE | DVVMTQTP | EVQLQQSGAELARPGASVKMSCKASGYTFTTYTMHW | DVVMTQTPLSLPVSLG |
| | | | | LARPGASVKM | LSLPVSLG | VKQRPGQGLEWIGYINPSSGYTKYNQKFTDKATLTA | DQASISCRSSQSLVHS |
| | | | | SCKASGYTFT | DQASISCR | DKSSSTAYMQLSSLTSEDSAVYYCARLWAYWGQGTL | SGNTYLHWYLQKPGQS |
| | | | | TYTMHWVKQR | SSQSLVHS | VTVSAASTKGPSVFPLAPSSKSTSGGTAALGCLVKD | PKLLIYKGSNRFSGVS |
| | | | | PGQGLEWIGY | SGNTYLHW | YFPEPVTVSWNSGALTSGVHTFPAVLQSSGLYSLSS | DRFSGSGSGTDFTLKI |
| | | | | INPSSGYTKY | YLQKPGQS | VVTVPSSSLGTQTYICNVNHKPSNTKVDKKVEPKSC | SRVEAEDLGVYFCSQS |
| | | | | NQKFTDKATL | PKLLIYKG | DKTHTCPPCPAPELLGGPSVFLFPPKPKDTLMISRT | THVPFTFGSGTKLEMK |
| | | | | TADKSSSTAY | SNRFSGVS | PEVTCVVVDVSHEDPEVKFNWYVDGVEVHNAKTKPR | RTVAAPSVFIFPPSDE |
| | | | | MQLSSLTSED | DRFSGSGS | EEQYNSTYRVVSVLTVLHQDWLNGKEYKCKVSNKAL | QLKSGTASVVCLLNNF |
| | | | | SAVYYCARLW | GTDFTLKI | PAPIEKTISKAKGQPREPQVYTLPPSREEMTKNQVS | YPREAKVQWKVDNALQ |
| | | | | AYWGQGTLVT | SRVEAEDL | LTCLVKGFYPSDIAVEWESNGQPENNYKTTPPVLDS | SGNSQESVTEQDSKDS |
| | | | | VSA | GVYFCSQS | DGSFFLYSKLTVDKSRWQQGNVFSCSVMHEALHNHY | TYSLSSTLTLSKADYE |
| | | | | | THVPFTFG | TQKSLSLSPGK | KHKVYACEVTHQGLSS |
| | | | | | SGTKLEMK | | PVTKSFNRGEC |
| | | | | 1969 | 1970 | 1971 | 1972 |
| 59 | CD8B250 | IgG1 | Kappa | QVQLKESGPG | DIVMTQSQ | QVQLKESGPGLVAPSQSLSITCTVSGFSLSNYVVHW | DIVMTQSQKFMSTSVG |
| | | | | LVAPSQSLSI | KFMSTSVG | VRQSPGKGLEWLGVIWTDGSTDYNAAFISRLSISKD | DRVSVTCKASQNVDTD |
| | | | | TCTVSGFSLS | DRVSVTCK | NSKSQVFFKMNSLQADDTAIYYCARNNGYFPAFFAY | ITWYQQKPGQSPKALI |
| | | | | NYVVHWVRQS | ASQNVDTD | WGQGTLVTVSAASTKGPSVFPLAPSSKSTSGGTAAL | YSASYRYSGVPDRFTG |
| | | | | PGKGLEWLGV | ITWYQQKP | GCLVKDYFPEPVTVSWNSGALTSGVHTFPAVLQSSG | SGSGTDFTLTITNVQS |
| | | | | IWTDGSTDYN | GQSPKALI | LYSLSSVVTVPSSSLGTQTYICNVNHKPSNTKVDKK | EDLAEYFCQQYNSYPL |
| | | | | AAFISRLSIS | YSASYRYS | VEPKSCDKTHTCPPCPAPELLGGPSVFLFPPKPKDT | TFGSGTKLEMKRTVAA |
| | | | | KDNSKSQVFF | GVPDRFTG | LMISRTPEVTCVVVDVSHEDPEVKFNWYVDGVEVHN | PSVFIFPPSDEQLKSG |
| | | | | KMNSLQADDT | SGSGTDFT | AKTKPREEQYNSTYRVVSVLTVLHQDWLNGKEYKCK | TASVVCLLNNFYPREA |
| | | | | AIYYCARNNG | LTITNVQS | VSNKALPAPIEKTISKAKGQPREPQVYTLPPSREEM | KVQWKVDNALQSGNSQ |
| | | | | YFPAFFAYWG | EDLAEYFC | TKNQVSLTCLVKGFYPSDIAVEWESNGQPENNYKTT | ESVTEQDSKDSTYSLS |
| | | | | QGTLVTVSA | QQYNSYPL | PPVLDSDGSFFLYSKLTVDKSRWQQGNVFSCSVMHE | STLTLSKADYEKHKVY |
| | | | | | TFGSGTKL | ALHNHYTQKSLSLSPGK | ACEVTHQGLSSPVTKS |
| | | | | | EMK | | FNRGEC |
| | | | | 2003 | 2004 | 2005 | 2006 |
| 60 | CD8B254 | IgG1 | Kappa | EVQLQQSGAE | DVVMTQTP | EVQLQQSGAELVKPGASVKMSCKTSGYTFSSYWITW | DVVMTQTPLSLPVSLG |
| | | | | LVKPGASVKM | LSLPVSLG | VKQRPGQGLEWVGDIYPGSGSTNYNEKFKSKAALTV | DQASISCRSSQSLVHS |
| | | | | SCKTSGYTFS | DQASISCR | DTSSSTAFMQLNSLTSEDSAVYYCARESITTRITPF | SGNTYLHWYLQKPGQS |
| | | | | SYWITWVKQR | SSQSLVHS | DHWGQGTTLTVSSASTKGPSVFPLAPSSKSTSGGTA | PKLLIYKGSNRFSGVS |
| | | | | PGQGLEWVGD | SGNTYLHW | ALGCLVKDYFPEPVTVSWNSGALTSGVHTFPAVLQS | DRFSGSGSGTDFTLKI |
| | | | | IYPGSGSTNY | YLQKPGQS | SGLYSLSSVVTVPSSSLGTQTYICNVNHKPSNTKVD | SRVEAEDLGVYFCSQS |
| | | | | NEKFKSKAAL | PKLLIYKG | KKVEPKSCDKTHTCPPCPAPELLGGPSVFLFPPKPK | THVPFTFGSGTKLEIK |
| | | | | TVDTSSSTAF | SNRFSGVS | DTLMISRTPEVTCVVVDVSHEDPEVKFNWYVDGVEV | RTVAAPSVFIFPPSDE |
| | | | | MQLNSLTSED | DRFSGSGS | HNAKTKPREEQYNSTYRVVSVLTVLHQDWLNGKEYK | QLKSGTASVVCLLNNF |
| | | | | SAVYYCARES | GTDFTLKI | CKVSNKALPAPIEKTISKAKGQPREPQVYTLPPSRE | YPREAKVQWKVDNALQ |
| | | | | ITTRITPFDH | SRVEAEDL | EMTKNQVSLTCLVKGFYPSDIAVEWESNGQPENNYK | SGNSQESVTEQDSKDS |
| | | | | WGQGTTLTVS | GVYFCSQS | TTPPVLDSDGSFFLYSKLTVDKSRWQQGNVFSCSVM | TYSLSSTLTLSKADYE |
| | | | | S | THVPFTFG | HEALHNHYTQKSLSLSPGK | KHKVYACEVTHQGLSS |
| | | | | | SGTKLEIK | | PVTKSFNRGEC |
| | | | | 2037 | 2038 | 2039 | 2040 |
| 61 | CD8B261 | IgG1 | Kappa | QVQLQQPGAE | DIVLTQSP | QVQLQQPGAELVKPGASVKLSCKASGYTFNSYWINW | DIVLTQSPSSMYASLG |
| | | | | LVKPGASVKL | SSMYASLG | MKQRPGQGLEWIGNIYPGSSSTNYNEKFKSKATLTV | ERVTITCKASQDINRY |
| | | | | SCKASGYTFN | ERVTITCK | DTSSSTAYMQLSSLTSDDSAVYYCARELGGYYRYNA | LSWFQQKPGKSPKTLI |
| | | | | SYWINWMKQR | ASQDINRY | MDYWGQGTSVTVSSASTKGPSVFPLAPSSKSTSGGT | YRANTLVDGVPSRFSG |
| | | | | PGQGLEWIGN | LSWFQQKP | AALGCLVKDYFPEPVTVSWNSGALTSGVHTFPAVLQ | SGSGQDYSLTISSLEY |
| | | | | IYPGSSSTNY | GKSPKTLI | SSGLYSLSSVVTVPSSSLGTQTYICNVNHKPSNTKV | EDMGIYYCLQYDEFPY |
| | | | | NEKFKSKATL | YRANTLVD | DKKVEPKSCDKTHTCPPCPAPELLGGPSVFLFPPKP | TFGSGTKLEMKRTVAA |
| | | | | TVDTSSSTAY | GVPSRFSG | KDTLMISRTPEVTCVVVDVSHEDPEVKFNWYVDGVE | PSVFIFPPSDEQLKSG |
| | | | | MQLSSLTSDD | SGSGQDYS | VHNAKTKPREEQYNSTYRVVSVLTVLHQDWLNGKEY | TASVVCLLNNFYPREA |
| | | | | SAVYYCAREL | LTISSLEY | KCKVSNKALPAPIEKTISKAKGQPREPQVYTLPPSR | KVQWKVDNALQSGNSQ |
| | | | | GGYYRYNAMD | EDMGIYYC | EEMTKNQVSLTCLVKGFYPSDIAVEWESNGQPENNY | ESVTEQDSKDSTYSLS |
| | | | | YWGQGTSVTV | LQYDEFPY | KTTPPVLDSDGSFFLYSKLTVDKSRWQQGNVFSCSV | STLTLSKADYEKHKVY |
| | | | | SS | TFGSGTKL | MHEALHNHYTQKSLSLSPGK | ACEVTHQGLSSPVTKS |
| | | | | | EMK | | FNRGEC |
| | | | | 2071 | 2072 | 2073 | 2074 |
| 62 | CD8B311 | IgG1 | Kappa | QVQLKESGPE | DIQMTQTT | QVQLKESGPELVKPGASVKLSCKASGYTFTSYWMHW | DIQMTQTTSSLSASLG |
| | | | | LVKPGASVKL | SSLSASLG | VKQRPGQGLEWIGMIHPNSGSTNYNEKFKSKATLTV | DRVTISCSASQGISNC |
| | | | | SCKASGYTFT | DRVTISCS | DKSSSTAYMQLSSLTSEDSAVYYCARCGYDGAWFAY | LNWYQQKPDGTVKLLI |
| | | | | SYWMHWVKQR | ASQGISNC | WGQGTSVTVSSASTKGPSVFPLAPSSKSTSGGTAAL | HYTSSLHSGVPSRFSG |
| | | | | PGQGLEWIGM | LNWYQQKP | GCLVKDYFPEPVTVSWNSGALTSGVHTFPAVLQSSG | GGSGTHYSLTISNLEP |
| | | | | IHPNSGSTNY | DGTVKLLI | LYSLSSVVTVPSSSLGTQTYICNVNHKPSNTKVDKK | EDIATYYCQQYSKVPY |
| | | | | NEKFKSKATL | HYTSSLHS | VEPKSCDKTHTCPPCPAPELLGGPSVFLFPPKPKDT | TFGSGTKLEIKRTVAA |
| | | | | TVDKSSSTAY | GVPSRFSG | LMISRTPEVTCVVVDVSHEDPEVKFNWYVDGVEVHN | PSVFIFPPSDEQLKSG |
| | | | | MQLSSLTSED | GGSGTHYS | AKTKPREEQYNSTYRVVSVLTVLHQDWLNGKEYKCK | TASVVCLLNNFYPREA |
| | | | | SAVYYCARCG | LTISNLEP | VSNKALPAPIEKTISKAKGQPREPQVYTLPPSREEM | KVQWKVDNALQSGNSQ |
| | | | | YDGAWFAYWG | EDIATYYC | TKNQVSLTCLVKGFYPSDIAVEWESNGQPENNYKTT | ESVTEQDSKDSTYSLS |
| | | | | QGTSVTVSS | QQYSKVPY | PPVLDSDGSFFLYSKLTVDKSRWQQGNVFSCSVMHE | STLTLSKADYEKHKVY |
| | | | | | TFGSGTKL | ALHNHYTQKSLSLSPGK | ACEVTHQGLSSPVTKS |
| | | | | | EIK | | FNRGEC |
| | | | | 2105 | 2106 | 2107 | 2108 |
| 63 | CD8B340 | IgG1 | Kappa | QVQLQQPGAE | DIVMTQTP | QVQLQQPGAELVKPGASVRLSCKASGYTFTNYWMQW | DIVMTQTPLTLSVTIG |
| | | | | LVKPGASVRL | LTLSVTIG | VQQRPGQGLEWIGEIDPSDTFTNYNQNFKDKATLTV | QPASISCKSSQSLLYS |
| | | | | SCKASGYTFT | QPASISCK | DTSSSTAYLQLSSLTSEDSAVYYCARGDWDRDWYFD | DGKTYLNWLLQRPGES |
| | | | | NYWMQWVQQR | SSQSLLYS | VWGTGTLVTVSAASTKGPSVFPLAPSSKSTSGGTAA | PKLLIYLVSKLDSGVP |
| | | | | PGQGLEWIGE | DGKTYLNW | LGCLVKDYFPEPVTVSWNSGALTSGVHTFPAVLQSS | DRFTGSGSGTDFTLKI |
| | | | | IDPSDTFTNY | LLQRPGES | GLYSLSSVVTVPSSSLGTQTYICNVNHKPSNTKVDK | SRVETEDLGIYYCLQA |
| | | | | NQNFKDKATL | PKLLIYLV | KVEPKSCDKTHTCPPCPAPELLGGPSVFLFPPKPKD | THFPHTFGAGTKLELK |
| | | | | TVDTSSSTAY | SKLDSGVP | TLMISRTPEVTCVVVDVSHEDPEVKFNWYVDGVEVH | RTVAAPSVFIFPPSDE |
| | | | | LQLSSLTSED | DRFTGSGS | NAKTKPREEQYNSTYRVVSVLTVLHQDWLNGKEYKC | QLKSGTASVVCLLNNF |
| | | | | SAVYYCARGD | GTDFTLKI | KVSNKALPAPIEKTISKAKGQPREPQVYTLPPSREE | YPREAKVQWKVDNALQ |
| | | | | WDRDWYFDVW | SRVETEDL | MTKNQVSLTCLVKGFYPSDIAVEWESNGQPENNYKT | SGNSQESVTEQDSKDS |
| | | | | GTGTLVTVSA | GIYYCLQA | TPPVLDSDGSFFLYSKLTVDKSRWQQGNVFSCSVMH | TYSLSSTLTLSKADYE |
| | | | | | THFPHTFG | EALHNHYTQKSLSLSPGK | KHKVYACEVTHQGLSS |
| | | | | | AGTKLELK | | PVTKSFNRGEC |
| | | | | 2139 | 2140 | 2141 | 2142 |
| 64 | CD8B362 | IgG1 | Kappa | EVKLVESGAE | DIQMTQSP | EVKLVESGAELVKPGASVKLSCTASGFNIKDTYMHW | DIQMTQSPSSLSASLG |
| | | | | LVKPGASVKL | SSLSASLG | VKQRPEQGLEWIGRIDPANGHTKFDPKFQGKATITA | DRVSLTCRASHEISGY |
| | | | | SCTASGFNIK | DRVSLTCR | DTSSNTAYLQLSSLTSEDTAVYYCAIRFAYWGQGTL | LSWLQQKPDGTFKRLI |
| | | | | DTYMHWVKQR | ASHEISGY | VTVSAASTKGPSVFPLAPSSKSTSGGTAALGCLVKD | YAASTLDSGVPKRFSG |
| | | | | PEQGLEWIGR | LSWLQQKP | YFPEPVTVSWNSGALTSGVHTFPAVLQSSGLYSLSS | SRSGSDYSLSISSLES |
| | | | | IDPANGHTKF | DGTFKRLI | VVTVPSSSLGTQTYICNVNHKPSNTKVDKKVEPKSC | EDFADYYCLQYSSYPY |
| | | | | DPKFQGKATI | YAASTLDS | DKTHTCPPCPAPELLGGPSVFLFPPKPKDTLMISRT | TFGSGTKLEMKRTVAA |
| | | | | TADTSSNTAY | GVPKRFSG | PEVTCVVVDVSHEDPEVKFNWYVDGVEVHNAKTKPR | PSVFIFPPSDEQLKSG |
| | | | | LQLSSLTSED | SRSGSDYS | EEQYNSTYRVVSVLTVLHQDWLNGKEYKCKVSNKAL | TASVVCLLNNFYPREA |
| | | | | TAVYYCAIRF | LSISSLES | PAPIEKTISKAKGQPREPQVYTLPPSREEMTKNQVS | KVQWKVDNALQSGNSQ |
| | | | | AYWGQGTLVT | EDFADYYC | LTCLVKGFYPSDIAVEWESNGQPENNYKTTPPVLDS | ESVTEQDSKDSTYSLS |
| | | | | VSA | LQYSSYPY | DGSFFLYSKLTVDKSRWQQGNVFSCSVMHEALHNHY | STLTLSKADYEKHKVY |
| | | | | | TFGSGTKL | TQKSLSLSPGK | ACEVTHQGLSSPVTKS |
| | | | | | EMK | | FNRGEC |
| | | | | 2173 | 2174 | 2175 | 2176 |

TABLE 17
Kabat CDR Amino Acid Sequences

| | Protein | HC Kabat | | | | LC Kabat | LC Kabat |
|---|---|---|---|---|---|---|---|
| # | Name | CDR1 | HC Kabat CDR2 | HC Kabat CDR3 | LC Kabat CDR1 | CDR2 | CDR3 |
| 1 | CD8B191 | DYYMN | RVIPSNGGTIYNLKFKG | EDYNNQGFFLDAMDY | RASQSISDFLH | YASQSIS | QNGHSFPYT |
| | | 1 | 2 | 3 | 4 | 5 | 6 |
| 2 | CD8B226 | DYYMN | RIIPSNGATIYNQKFKG | EDYSNQGFFLDAMDY | RASQSISHYLH | YASQSIS | QNGHSFPYT |
| | | 35 | 36 | 37 | 38 | 39 | 40 |
| 3 | CD8B259 | DYYMN | RVIPSNGGTIYNQKFRG | EDYGNQGFFLDAMDY | RASQSISHFLH | YASQSIS | QSGHSFPYT |
| | | 69 | 70 | 71 | 72 | 73 | 74 |
| 4 | CD8B298 | DYYMN | RVIPNNGGTRYNQKFKG | EDFSNQGFFLDAMDY | RASQTISDYLH | YASQSIS | QNGHSFPYT |
| | | 103 | 104 | 105 | 106 | 107 | 108 |
| 5 | CD8B342 | DYYVN | RVIPNNGNVIYNQNFKG | EDYSNQGFFLDAMDY | RASQTISNYLH | YASQSIS | QNGHSFPYT |
| | | 137 | 138 | 139 | 140 | 141 | 142 |
| 6 | CD8B364 | SYWMH | EINPSNGDSYYNEKFKR | SMYYDGRAGAY | ITSTDIDDDMN | EGNTLRP | LQSDNMPLT |
| | | 171 | 172 | 173 | 174 | 175 | 176 |
| 7 | CD8B200 | NYWIH | NIDPSDSETHYNQKFKD | GLTGTGYY | RASQDISPYLN | YTSKLHS | QQDNTLPYT |
| | | 205 | 206 | 207 | 208 | 209 | 210 |
| 8 | CD8B247 | DYYMN | RVIPNNGGTIYNQKFKD | EDYSNQGFFLDAMDY | RASQTISHFLH | YASQSIS | QSGHSFPYT |
| | | 239 | 240 | 241 | 242 | 243 | 244 |
| 9 | CD8B265 | DYYMN | RVIPRNGATTYNQNFRG | EDFSNQGFFLDAMDY | RASQSISHYLH | YASQSIS | QNGHSFPYT |
| | | 273 | 274 | 275 | 276 | 277 | 278 |
| 10 | CD8B270 | NYWMH | NIDPSDSETHYNQKFKD | GLTGTGYY | RASQDIRPYLN | FTSKLHS | QQDNTLPYT |
| | | 307 | 308 | 309 | 310 | 311 | 312 |
| 11 | CD8B213 | DYYMD | YIYPNNGITSYNQKFKG | SIYYDHGGGFPY | KASQNVDKYVA | SASYRYS | QQYNTYPS |
| | | 341 | 342 | 343 | 344 | 345 | 346 |
| 12 | CD8B240 | DYYMN | RVIPSNGGTIYNLKFKG | EDYNNQGFFLDAMDY | RASQSISDFLH | YASQSIS | QNGHSFPYT |
| | | 375 | 376 | 377 | 378 | 379 | 380 |
| 13 | CD8B361 | DYYMD | YIYPNNGDTRYNQKFKD | SIYYDHGGGFPY | KASQNVGTYVA | SASYRYS | QQYNSYPT |
| | | 409 | 410 | 411 | 412 | 413 | 414 |
| 14 | CD8B246 | TSGMNVG | HIWWDDDKYYNPSLKS | RGNYGNYEFAY | RASQDIRNYLN | HTSRLHS | QQGNTLPWT |
| | | 443 | 444 | 445 | 446 | 447 | 448 |
| 15 | CD8B268 | VYTIH | WFYPGSGNIKYNEKFKD | HEDNHYYDGNSWFAY | RASGNIHNYLA | NAKTLAD | QHFWNTPYT |
| | | 477 | 478 | 479 | 480 | 481 | 482 |
| 16 | CD8B271 | IYSIH | MIWGGGDTDYNSALKS | NPHYYGGTYEYFDV | SASQGISNYLN | DTSILYS | QQYSNLPYT |
| | | 511 | 512 | 513 | 514 | 515 | 516 |
| 17 | CD8B273 | EYTIH | WFYPGTGSIKYNEKFKD | HEDNHYYDGNSWFAY | RASGNIHNYLA | NAKTLAD | QHFWSTPYT |
| | | 545 | 546 | 547 | 548 | 549 | 550 |
| 18 | CD8B288 | EYTIH | WFYPGNGNMRYNEKFKD | YEDNHYYDGASWFAY | RASGNIHNYLA | NAKTLAD | QHFWSTPFT |
| | | 579 | 580 | 581 | 582 | 583 | 584 |
| 19 | CD8B292 | DDYIY | WIDPENGATEYASKFQG | HDYGYAMDY | TASSSVSSSYLH | STSNLAS | HQYHRSPLT |
| | | 613 | 614 | 615 | 616 | 617 | 618 |
| 20 | CD8B303 | IYSIH | MIWGGGSTDYNSTLNS | NPHHYGGSTGAMDY | KASQDIKKYMA | YTSSLQP | LQYDNLFT |
| | | 647 | 648 | 649 | 650 | 651 | 652 |
| 21 | CD8B304 | TSGMNVG | HIWWDDDKYYNPSLKS | RGNYGNYEFAY | RASQDIRNYLN | HTSRLHS | QQGNTLPWT |
| | | 681 | 682 | 683 | 684 | 685 | 686 |
| 22 | CD8B312 | SFWMH | NVDPSDSQTHYNQKFKD | STYYRYDGPFTY | RASQSINNNLH | YTSQSIS | QQSNSWPLT |
| | | 715 | 716 | 717 | 718 | 719 | 720 |
| 23 | CD8B347 | SYWMN | AVNPSNSYTEYAQKFKD | SGLYNTNHLAWFAY | RASGNIHNYLA | NAETLAD | QHFWNNPLT |
| | | 749 | 750 | 751 | 752 | 753 | 754 |
| 24 | CD8B350 | AYWIN | SINPSNGYTEYSQKFKD | SGLYYTNHLAWCPY | RASGNIHNYLA | NAETLAD | QHFWNSPLT |
| | | 783 | 784 | 785 | 786 | 787 | 788 |
| 25 | CD8B356 | SGYYWN | YISYDGSNNYNPSLKN | NHGDAMDY | KASQNVGTAVA | SASYRYT | QQYSSYLT |
| | | 817 | 818 | 819 | 820 | 821 | 822 |
| 26 | CD8B369 | NTYIS | WIYTGTGGTWYNQKFTD | TNWDWYFDV | RASENIYSYLA | YAKTLTD | QHHYGRPYT |
| | | 851 | 852 | 853 | 854 | 855 | 856 |
| 27 | CD8B371 | DYYMA | HINYDGSITYYLDSLKS | EDYSNYGFAY | HASQNINVWLS | KASNLHT | QQGQSYPLT |
| | | 885 | 886 | 887 | 888 | 889 | 890 |
| 28 | CD8B182 | SYWMN | AVNPTNYYTEYIQKFKD | SGLYNTNHLAWFAY | RASENIHNYLA | NAKTLAN | QHFWTTPLT |
| | | 919 | 920 | 921 | 922 | 923 | 924 |
| 29 | CD8B205 | SYWMH | NIDPSDSETHYNQKFKD | VYYSYYSYDATYFDY | RASENIYSYLA | NAKTLAE | QHHYTTPLT |
| | | 953 | 954 | 955 | 956 | 957 | 958 |
| 30 | CD8B223 | SYSVH | VIWAGGSTNYNSAFMS | HSYYSFDAFDY | KASQNVNTDVA | SASYRYS | QQCNSYPLT |
| | | 987 | 988 | 989 | 990 | 991 | 992 |
| 31 | CD8B234 | SGYYWN | YINYDGRNNYNPSLKN | DQGYSKFYFDY | KASEDIYNRLA | GATSLET | QQYWSFPRT |
| | | 1021 | 1022 | 1023 | 1024 | 1025 | 1026 |
| 32 | CD8B251 | TYAVH | VIWSGGSTDYNAAFIS | HSYYHYNAMDN | KASQNVGTAVA | SASNRYT | QQYSSYPFT |
| | | 1055 | 1056 | 1057 | 1058 | 1059 | 1060 |
| 33 | CD8B269 | SGYYWN | YISYDGSNNYNPSLKN | NHGDAMDH | KASQNVGTDVA | SASYRYS | QQYKSYPLT |
| | | 1089 | 1090 | 1091 | 1092 | 1093 | 1094 |
| 34 | CD8B290 | RYSVH | MIWGGGSTDYNSALKS | IYFDNYVGFAY | KASQDVGTVVA | WTSTRHT | QQYSSYPYT |
| | | 1123 | 1124 | 1125 | 1126 | 1127 | 1128 |
| 35 | CD8B310 | NYAVH | VIWTDGSTDYNAGFIS | NNGYFPAFFAY | RSSQTIVHSNGNTYLE | KVSNRFS | FQGSHAPFT |
| | | 1157 | 1158 | 1159 | 1160 | 1161 | 1162 |
| 36 | CD8B352 | SGYYWN | YINYDGRNNYNPSLRN | DQGYSKFYFDY | KASEDIYNRLA | GATSLET | QQYWSFPRT |
| | | 1191 | 1192 | 1193 | 1194 | 1195 | 1196 |
| 37 | CD8B319 | AYYMH | EINPSAGGTTYNQKFKA | WTNPFDY | KASQNVGTAVA | SASYRYT | QQYNNYLT |
| | | 1225 | 1226 | 1227 | 1228 | 1229 | 1230 |
| 38 | CD8B194 | SYWIN | NIYPGSSSTNYNEKFKS | ELGPYYRYSAMVY | KASQNVGTAVA | SASNRYT | QQYSSYPFT |
| | | 1259 | 1260 | 1261 | 1262 | 1263 | 1264 |
| 39 | CD8B231 | NYWMH | NIDPSDSETHYNQKFKD | GLTGTGHY | RASQDINIYLN | HTSRLHS | QQDNTLPYT |
| | | 1293 | 1294 | 1295 | 1296 | 1297 | 1298 |
| 40 | CD8B238 | DYSMD | YIYTYSGGAGYNRKFKS | DSSDYEFAY | KASQDIKSYLS | RANRLVD | LQYDEFRT |
| | | 1327 | 1328 | 1329 | 1330 | 1331 | 1332 |
| 41 | CD8B255 | TSGMGVS | HIFWDDDKRYNPSLKS | RDGYGDYAYFDV | RASENIYSDLA | AATILTD | QHFWGTPWT |
| | | 1361 | 1362 | 1363 | 1364 | 1365 | 1366 |
| 42 | CD8B324 | SHWIH | NIYPGSSSTNYNEKFKR | HSPGHRDYAMDY | KASQNVGTAVA | SASNRYT | QQYSTYPLT |
| | | 1395 | 1396 | 1397 | 1398 | 1399 | 1400 |
| 43 | CD8B337 | TSGMGVS | HIFWDDDRRYKSSLKS | RVGYGDYAYFDV | RASENIYSDLA | AATNLAD | QHFWGTPWT |
| | | 1429 | 1430 | 1431 | 1432 | 1433 | 1434 |
| 44 | CD8B344 | NYWIN | NIYPGSDSSNYNEKFKT | EEADYRYTWFVY | KASQNVGTAVA | SASNRYT | QQYSSYPLT |
| | | 1463 | 1464 | 1465 | 1466 | 1467 | 1468 |
| 45 | CD8B264 | SYWIN | NIYPGSSSTNYNEKFKN | EEYSYKSSWFAY | KASQNVGTAVA | SASNRYN | QQYSTYPYT |
| | | 1497 | 1498 | 1499 | 1500 | 1501 | 1502 |
| 46 | CD8B318 | SYWIS | NIYPGSSSSNYNENFKS | EEYSYFPSWFAY | KASQNVGTAVA | SASNRYT | QQYSTYPFT |
| | | 1531 | 1532 | 1533 | 1534 | 1535 | 1536 |
| 47 | CD8B333 | SFWIN | NIYPGSSSTNYSEKFKN | EEYSYKSSWFAY | KASQNVGTAVA | SASNRYN | QQYSTYPYT |
| | | 1565 | 1566 | 1567 | 1568 | 1569 | 1570 |
| 48 | CD8B366 | DDYIH | RIDPANGNPRYAPKFQD | DDEGYYYFDV | RASKSISKYLA | SGSTLQS | QQHNEYPLT |
| | | 1599 | 1600 | 1601 | 1602 | 1603 | 1604 |
| 49 | CD8B368 | SYWIN | NIYPFSSSTNYNEKFKK | EEFSHYPSWFAY | KASQNVGIAVA | SASNRYT | QQYSTDPYT |
| | | 1633 | 1634 | 1635 | 1636 | 1637 | 1638 |
| 50 | CD8B370 | SYWIN | NIYPGSSSTNYNEKFKN | ELGAYYHYSAMDY | KASQNVGTAVA | SASNRYT | QQYSIYPFT |
| | | 1667 | 1668 | 1669 | 1670 | 1671 | 1672 |
| 51 | CD8B186 | SYWMH | NINPSSGYAVYNQKFKD | RVFYGDSWFAY | RASGNIHNYLA | NAKTLAD | QHFWSTTWT |
| | | 1701 | 1702 | 1703 | 1704 | 1705 | 1706 |
| 52 | CD8B190 | SYYMH | YIDPFNGNTNYKQKFKG | PNSNYVGTWFAY | HASQNINVWLS | KASNLHT | QQGQSFPFT |
| | | 1735 | 1736 | 1737 | 1738 | 1739 | 1740 |
| 53 | CD8B192 | DYYMN | VINPYNGGTTYNQRFTG | NYGAMDS | RASGNIHNYLA | NAKTLAD | QHFWITPPT |
| | | 1769 | 1770 | 1771 | 1772 | 1773 | 1774 |
| 54 | CD8B193 | DYYMN | DINPNGGGTSDNPKFKG | TSGTDWYFDV | KASQNVGTAVA | SASNRYT | QQYSSYPFT |
| | | 1803 | 1804 | 1805 | 1806 | 1807 | 1808 |
| 55 | CD8B214 | TAGIQ | WINTHAGESKYADDFKG | SGDYDGSHPFAY | RASQDIRPYLN | YTSRLHS | QQDNTLPYT |
| | | 1837 | 1838 | 1839 | 1840 | 1841 | 1842 |
| 56 | CD8B230 | DYYMN | DINPNGGGTSDNPKFKG | TSGTDWYFDV | KASQNVGTAVA | STSNRYT | QQYSIYPFT |
| | | 1871 | 1872 | 1873 | 1874 | 1875 | 1876 |
| 57 | CD8B245 | DYYMS | LSRNKGNGYTTEYSASVKG | TVTGTLFYYALDY | RASENIYSYLA | NAKTLAA | QHHYGTPLT |
| | | 1905 | 1906 | 1907 | 1908 | 1909 | 1910 |
| 58 | CD8B248 | TYTMH | YINPSSGYTKYNQKFTD | LWAY | RSSQSLVHSSGNTYLH | KGSNRFS | SQSTHVPFT |
| | | 1939 | 1940 | 1941 | 1942 | 1943 | 1944 |
| 59 | CD8B250 | NYVVH | VIWTDGSTDYNAAFIS | NNGYFPAFFAY | KASQNVDTDIT | SASYRYS | QQYNSYPLT |
| | | 1973 | 1974 | 1975 | 1976 | 1977 | 1978 |
| 60 | CD8B254 | SYWIT | DIYPGSGSTNYNEKFKS | ESITTRITPFDH | RSSQSLVHSSGNTYLH | KGSNRFS | SQSTHVPFT |
| | | 2007 | 2008 | 2009 | 2010 | 2011 | 2012 |
| 61 | CD8B261 | SYWIN | NIYPGSSSTNYNEKFKS | ELGGYYRYNAMDY | KASQDINRYLS | RANTLVD | LQYDEFPYT |
| | | 2041 | 2042 | 2043 | 2044 | 2045 | 2046 |
| 62 | CD8B311 | SYWMH | MIHPNSGSTNYNEKFKS | CGYDGAWFAY | SASQGISNCLN | YTSSLHS | QQYSKVPYT |
| | | 2075 | 2076 | 2077 | 2078 | 2079 | 2080 |
| 63 | CD8B340 | NYWMQ | EIDPSDTFTNYNQNFKD | GDWDRDWYFDV | KSSQSLLYSDGKTYLN | LVSKLDS | LQATHFPHT |
| | | 2109 | 2110 | 2111 | 2112 | 2113 | 2114 |
| 64 | CD8B362 | DTYMH | RIDPANGHTKFDPKFQG | RFAY | RASHEISGYLS | AASTLDS | LQYSSYPYT |
| | | 2143 | 2144 | 2145 | 2146 | 2147 | 2148 |

TABLE 18
Chothia CDR Amino Acid Sequences

| | Protein | HC Chothia | HC Chothia | | | LC Chothia | LC Chothia |
|---|---|---|---|---|---|---|---|
| # | Name | CDR1 | CDR2 | HC Chothia CDR3 | LC Chothia CDR1 | CDR2 | CDR3 |
| 1 | CD8B191 | GYTFTDY | IPSNGG | EDYNNQGFFLDAMD | SQSISDF | YAS | GHSFPY |
| | | 7 | 8 | 9 | 10 | 11 | 12 |
| 2 | CD8B226 | GYTFTDY | IPSNGA | EDYSNQGFFLDAMD | SQSISHY | YAS | GHSFPY |
| | | 41 | 42 | 43 | 44 | 45 | 46 |
| 3 | CD8B259 | GYTFTDY | IPSNGG | EDYGNQGFFLDAMD | SQSISHF | YAS | GHSFPY |
| | | 75 | 76 | 77 | 78 | 79 | 80 |
| 4 | CD8B298 | GYTFTDY | IPNNGG | EDFSNQGFFLDAMD | SQTISDY | YAS | GHSFPY |
| | | 109 | 110 | 111 | 112 | 113 | 114 |
| 5 | CD8B342 | GYTFTDY | IPNNGN | EDYSNQGFFLDAMD | SQTISNY | YAS | GHSFPY |
| | | 143 | 144 | 145 | 146 | 147 | 148 |
| 6 | CD8B364 | GYTFTSY | NPSNGD | SMYYDGRAGA | STDIDDD | EGN | SDNMPL |
| | | 177 | 178 | 179 | 180 | 181 | 182 |
| 7 | CD8B200 | GYTFTNY | DPSDSE | GLTGTGY | SQDISPY | YTS | DNTLPY |
| | | 211 | 212 | 213 | 214 | 215 | 216 |
| 8 | CD8B247 | GYTFTDY | IPNNGG | EDYSNQGFFLDAMD | SQTISHF | YAS | GHSFPY |
| | | 245 | 246 | 247 | 248 | 249 | 250 |
| 9 | CD8B265 | GYSFTDY | IPRNGA | EDFSNQGFFLDAMD | SQSISHY | YAS | GHSFPY |
| | | 279 | 280 | 281 | 282 | 283 | 284 |
| 10 | CD8B270 | GYTFTNY | DPSDSE | GLTGTGY | SQDIRPY | FTS | DNTLPY |
| | | 313 | 314 | 315 | 316 | 317 | 318 |
| 11 | CD8B213 | GYIFTDY | YPNNGI | SIYYDHGGGFP | SQNVDKY | SAS | YNTYP |
| | | 347 | 348 | 349 | 350 | 351 | 352 |
| 12 | CD8B240 | GYTFTDY | IPSNGG | EDYNNQGFFLDAMD | SQSISDF | YAS | GHSFPY |
| | | 381 | 382 | 383 | 384 | 385 | 386 |
| 13 | CD8B361 | GYTFTDY | YPNNGD | SIYYDHGGGFP | SQNVGTY | SAS | YNSYP |
| | | 415 | 416 | 417 | 418 | 419 | 420 |
| 14 | CD8B246 | GFSLSTSGM | WWDDD | RGNYGNYEFA | SQDIRNY | HTS | GNTLPW |
| | | 449 | 450 | 451 | 452 | 453 | 454 |
| 15 | CD8B268 | GYTFTVY | YPGSGN | HEDNHYYDGNSWFA | SGNIHNY | NAK | FWNTPY |
| | | 483 | 484 | 485 | 486 | 487 | 488 |
| 16 | CD8B271 | GFSLSIY | WGGGD | NPHYYGGTYEYFD | SQGISNY | DTS | YSNLPY |
| | | 517 | 518 | 519 | 520 | 521 | 522 |
| 17 | CD8B273 | GYTFTEY | YPGTGS | HEDNHYYDGNSWFA | SGNIHNY | NAK | FWSTPY |
| | | 551 | 552 | 553 | 554 | 555 | 556 |
| 18 | CD8B288 | GYTFTEY | YPGNGN | YEDNHYYDGASWFA | SGNIHNY | NAK | FWSTPF |
| | | 585 | 586 | 587 | 588 | 589 | 590 |
| 19 | CD8B292 | GFNFKDD | DPENGA | HDYGYAMD | SSSVSSSY | STS | YHRSPL |
| | | 619 | 620 | 621 | 622 | 623 | 624 |
| 20 | CD8B303 | GFSLSIY | WGGGS | NPHHYGGSTGAMD | SQDIKKY | YTS | YDNLF |
| | | 653 | 654 | 655 | 656 | 657 | 658 |
| 21 | CD8B304 | GFSLSTSGM | WWDDD | RGNYGNYEFA | SQDIRNY | HTS | GNTLPW |
| | | 687 | 688 | 689 | 690 | 691 | 692 |
| 22 | CD8B312 | GYTFTSF | DPSDSQ | STYYRYDGPFT | SQSINNN | YTS | SNSWPL |
| | | 721 | 722 | 723 | 724 | 725 | 726 |
| 23 | CD8B347 | GYTFTSY | NPSNSY | SGLYNTNHLAWFA | SGNIHNY | NAE | FWNNPL |
| | | 755 | 756 | 757 | 758 | 759 | 760 |
| 24 | CD8B350 | GYTFAAY | NPSNGY | SGLYYTNHLAWCP | SGNIHNY | NAE | FWNSPL |
| | | 789 | 790 | 791 | 792 | 793 | 794 |
| 25 | CD8B356 | GYSITSGY | SYDGS | NHGDAMD | SQNVGTA | SAS | YSSYL |
| | | 823 | 824 | 825 | 826 | 827 | 828 |
| 26 | CD8B369 | GFTFTNT | YTGTGG | TNWDWYFD | SENIYSY | YAK | HYGRPY |
| | | 857 | 858 | 859 | 860 | 861 | 862 |
| 27 | CD8B371 | GFTFSDY | NYDGSI | EDYSNYGFA | SQNINVW | KAS | GQSYPL |
| | | 891 | 892 | 893 | 894 | 895 | 896 |
| 28 | CD8B182 | GYTFTSY | NPTNYY | SGLYNTNHLAWFA | SENIHNY | NAK | FWTTPL |
| | | 925 | 926 | 927 | 928 | 929 | 930 |
| 29 | CD8B205 | GYSFNSY | DPSDSE | VYYSYYSYDATYFD | SENIYSY | NAK | HYTTPL |
| | | 959 | 960 | 961 | 962 | 963 | 964 |
| 30 | CD8B223 | GFSLTSY | WAGGS | HSYYSFDAFD | SQNVNTD | SAS | CNSYPL |
| | | 993 | 994 | 995 | 996 | 997 | 998 |
| 31 | CD8B234 | GYSITSGY | NYDGR | DQGYSKFYFD | SEDIYNR | GAT | YWSFPR |
| | | 1027 | 1028 | 1029 | 1030 | 1031 | 1032 |
| 32 | CD8B251 | GFSLTTY | WSGGS | HSYYHYNAMD | SQNVGTA | SAS | YSSYPF |
| | | 1061 | 1062 | 1063 | 1064 | 1065 | 1066 |
| 33 | CD8B269 | GYSITSGY | SYDGS | NHGDAMD | SQNVGTD | SAS | YKSYPL |
| | | 1095 | 1096 | 1097 | 1098 | 1099 | 1100 |
| 34 | CD8B290 | GFSLSRY | WGGGS | IYFDNYVGFA | SQDVGTV | WTS | YSSYPY |
| | | 1129 | 1130 | 1131 | 1132 | 1133 | 1134 |
| 35 | CD8B310 | GFSLTNY | WTDGS | NNGYFPAFFA | SQTIVHSNGNTY | KVS | GSHAPF |
| | | 1163 | 1164 | 1165 | 1166 | 1167 | 1168 |
| 36 | CD8B352 | GYSITSGY | NYDGR | DQGYSKFYFD | SEDIYNR | GAT | YWSFPR |
| | | 1197 | 1198 | 1199 | 1200 | 1201 | 1202 |
| 37 | CD8B319 | GYSFTAY | NPSAGG | WTNPFD | SQNVGTA | SAS | YNNYL |
| | | 1231 | 1232 | 1233 | 1234 | 1235 | 1236 |
| 38 | CD8B194 | GYTFTSY | YPGSSS | ELGPYYRYSAMV | SQNVGTA | SAS | YSSYPF |
| | | 1265 | 1266 | 1267 | 1268 | 1269 | 1270 |
| 39 | CD8B231 | GYTFTNY | DPSDSE | GLTGTGH | SQDINIY | HTS | DNTLPY |
| | | 1299 | 1300 | 1301 | 1302 | 1303 | 1304 |
| 40 | CD8B238 | GYTFTDY | YTYSGG | DSSDYEFA | SQDIKSY | RAN | YDEFR |
| | | 1333 | 1334 | 1335 | 1336 | 1337 | 1338 |
| 41 | CD8B255 | GFSLNTSGM | FWDDD | RDGYGDYAYFD | SENIYSD | AAT | FWGTPW |
| | | 1367 | 1368 | 1369 | 1370 | 1371 | 1372 |
| 42 | CD8B324 | GYTSTSH | YPGSSS | HSPGHRDYAMD | SQNVGTA | SAS | YSTYPL |
| | | 1401 | 1402 | 1403 | 1404 | 1405 | 1406 |
| 43 | CD8B337 | GFSLSTSGM | FWDDD | RVGYGDYAYFD | SENIYSD | AAT | FWGTPW |
| | | 1435 | 1436 | 1437 | 1438 | 1439 | 1440 |
| 44 | CD8B344 | GYSFTNY | YPGSDS | EEADYRYTWFV | SQNVGTA | SAS | YSSYPL |
| | | 1469 | 1470 | 1471 | 1472 | 1473 | 1474 |
| 45 | CD8B264 | GYSFTSY | YPGSSS | EEYSYKSSWFA | SQNVGTA | SAS | YSTYPY |
| | | 1503 | 1504 | 1505 | 1506 | 1507 | 1508 |
| 46 | CD8B318 | GYTFTSY | YPGSSS | EEYSYFPSWFA | SQNVGTA | SAS | YSTYPF |
| | | 1537 | 1538 | 1539 | 1540 | 1541 | 1542 |
| 47 | CD8B333 | GYSFASF | YPGSSS | EEYSYKSSWFA | SQNVGTA | SAS | YSTYPY |
| | | 1571 | 1572 | 1573 | 1574 | 1575 | 1576 |
| 48 | CD8B366 | GFNIKDD | DPANGN | DDEGYYYFD | SKSISKY | SGS | HNEYPL |
| | | 1605 | 1606 | 1607 | 1608 | 1609 | 1610 |
| 49 | CD8B368 | GYTFTSY | YPFSSS | EEFSHYPSWFA | SQNVGIA | SAS | YSTDPY |
| | | 1639 | 1640 | 1641 | 1642 | 1643 | 1644 |
| 50 | CD8B370 | GYTFTSY | YPGSSS | ELGAYYHYSAMD | SQNVGTA | SAS | YSIYPF |
| | | 1673 | 1674 | 1675 | 1676 | 1677 | 1678 |
| 51 | CD8B186 | GYIFTSY | NPSSGY | RVFYGDSWFA | SGNIHNY | NAK | FWSTTW |
| | | 1707 | 1708 | 1709 | 1710 | 1711 | 1712 |
| 52 | CD8B190 | GYSFTSY | DPFNGN | PNSNYVGTWFA | SQNINVW | KAS | GQSFPF |
| | | 1741 | 1742 | 1743 | 1744 | 1745 | 1746 |
| 53 | CD8B192 | GYTFTDY | NPYNGG | NYGAMD | SGNIHNY | NAK | FWITPP |
| | | 1775 | 1776 | 1777 | 1778 | 1779 | 1780 |
| 54 | CD8B193 | GYKFTDY | NPNGGG | TSGTDWYFD | SQNVGTA | SAS | YSSYPF |
| | | 1809 | 1810 | 1811 | 1812 | 1813 | 1814 |
| 55 | CD8B214 | GYTFTTA | NTHAGE | SGDYDGSHPFA | SQDIRPY | YTS | DNTLPY |
| | | 1843 | 1844 | 1845 | 1846 | 1847 | 1848 |
| 56 | CD8B230 | GYTFTDY | NPNGGG | TSGTDWYFD | SQNVGTA | STS | YSIYPF |
| | | 1877 | 1878 | 1879 | 1880 | 1881 | 1882 |
| 57 | CD8B245 | GFTFTDY | RNKGNGYT | TVTGTLFYYALD | SENIYSY | NAK | HYGTPL |
| | | 1911 | 1912 | 1913 | 1914 | 1915 | 1916 |
| 58 | CD8B248 | GYTFTTY | NPSSGY | LWA | SQSLVHSSGNTY | KGS | STHVPF |
| | | 1945 | 1946 | 1947 | 1948 | 1949 | 1950 |
| 59 | CD8B250 | GFSLSNY | WTDGS | NNGYFPAFFA | SQNVDTD | SAS | YNSYPL |
| | | 1979 | 1980 | 1981 | 1982 | 1983 | 1984 |
| 60 | CD8B254 | GYTFSSY | YPGSGS | ESITTRITPFD | SQSLVHSSGNTY | KGS | STHVPF |
| | | 2013 | 2014 | 2015 | 2016 | 2017 | 2018 |
| 61 | CD8B261 | GYTFNSY | YPGSSS | ELGGYYRYNAMD | SQDINRY | RAN | YDEFPY |
| | | 2047 | 2048 | 2049 | 2050 | 2051 | 2052 |
| 62 | CD8B311 | GYTFTSY | HPNSGS | CGYDGAWFA | SQGISNC | YTS | YSKVPY |
| | | 2081 | 2082 | 2083 | 2084 | 2085 | 2086 |
| 63 | CD8B340 | GYTFTNY | DPSDTF | GDWDRDWYFD | SQSLLYSDGKTY | LVS | ATHFPH |
| | | 2115 | 2116 | 2117 | 2118 | 2119 | 2120 |
| 64 | CD8B362 | GFNIKDT | DPANGH | RFA | SHEISGY | AAS | YSSYPY |
| | | 2149 | 2150 | 2151 | 2152 | 2153 | 2154 |

TABLE 19
AbM CDR Amino Acid Sequences

| | Protein | | | | | LC AbM | |
|---|---|---|---|---|---|---|---|
| # | Name | HC AbM CDR1 | HC AbM CDR2 | HC AbM CDR3 | LC AbM CDR1 | CDR2 | LC AbM CDR3 |
| 1 | CD8B191 | GYTFTDYYMN | RVIPSNGGTI | EDYNNQGFFLDAMDY | RASQSISDFLH | YASQSIS | QNGHSFPYT |
| | | 13 | 14 | 15 | 16 | 17 | 18 |
| 2 | CD8B226 | GYTFTDYYMN | RIIPSNGATI | EDYSNQGFFLDAMDY | RASQSISHYLH | YASQSIS | QNGHSFPYT |
| | | 47 | 48 | 49 | 50 | 51 | 52 |
| 3 | CD8B259 | GYTFTDYYMN | RVIPSNGGTI | EDYGNQGFFLDAMDY | RASQSISHFLH | YASQSIS | QSGHSFPYT |
| | | 81 | 82 | 83 | 84 | 85 | 86 |
| 4 | CD8B298 | GYTFTDYYMN | RVIPNNGGTR | EDFSNQGFFLDAMDY | RASQTISDYLH | YASQSIS | QNGHSFPYT |
| | | 115 | 116 | 117 | 118 | 119 | 120 |
| 5 | CD8B342 | GYTFTDYYVN | RVIPNNGNVI | EDYSNQGFFLDAMDY | RASQTISNYLH | YASQSIS | QNGHSFPYT |
| | | 149 | 150 | 151 | 152 | 153 | 154 |
| 6 | CD8B364 | GYTFTSYWMH | EINPSNGDSY | SMYYDGRAGAY | ITSTDIDDDMN | EGNTLRP | LQSDNMPLT |
| | | 183 | 184 | 185 | 186 | 187 | 188 |
| 7 | CD8B200 | GYTFTNYWIH | NIDPSDSETH | GLTGTGYY | RASQDISPYLN | YTSKLHS | QQDNTLPYT |
| | | 217 | 218 | 219 | 220 | 221 | 222 |
| 8 | CD8B247 | GYTFTDYYMN | RVIPNNGGTI | EDYSNQGFFLDAMDY | RASQTISHFLH | YASQSIS | QSGHSFPYT |
| | | 251 | 252 | 253 | 254 | 255 | 256 |
| 9 | CD8B265 | GYSFTDYYMN | RVIPRNGATT | EDFSNQGFFLDAMDY | RASQSISHYLH | YASQSIS | QNGHSFPYT |
| | | 285 | 286 | 287 | 288 | 289 | 290 |
| 10 | CD8B270 | GYTFTNYWMH | NIDPSDSETH | GLTGTGYY | RASQDIRPYLN | FTSKLHS | QQDNTLPYT |
| | | 319 | 320 | 321 | 322 | 323 | 324 |
| 11 | CD8B213 | GYIFTDYYMD | YIYPNNGITS | SIYYDHGGGFPY | KASQNVDKYVA | SASYRYS | QQYNTYPS |
| | | 353 | 354 | 355 | 356 | 357 | 358 |
| 12 | CD8B240 | GYTFTDYYMN | RVIPSNGGTI | EDYNNQGFFLDAMDY | RASQSISDFLH | YASQSIS | QNGHSFPYT |
| | | 387 | 388 | 389 | 390 | 391 | 392 |
| 13 | CD8B361 | GYTFTDYYMD | YIYPNNGDTR | SIYYDHGGGFPY | KASQNVGTYVA | SASYRYS | QQYNSYPT |
| | | 421 | 422 | 423 | 424 | 425 | 426 |
| 14 | CD8B246 | GFSLSTSGMNVG | HIWWDDDKY | RGNYGNYEFAY | RASQDIRNYLN | HTSRLHS | QQGNTLPWT |
| | | 455 | 456 | 457 | 458 | 459 | 460 |
| 15 | CD8B268 | GYTFTVYTIH | WFYPGSGNIK | HEDNHYYDGNSWFAY | RASGNIHNYLA | NAKTLAD | QHFWNTPYT |
| | | 489 | 490 | 491 | 492 | 493 | 494 |
| 16 | CD8B271 | GFSLSIYSIH | MIWGGGDTD | NPHYYGGTYEYFDV | SASQGISNYLN | DTSILYS | QQYSNLPYT |
| | | 523 | 524 | 525 | 526 | 527 | 528 |
| 17 | CD8B273 | GYTFTEYTIH | WFYPGTGSIK | HEDNHYYDGNSWFAY | RASGNIHNYLA | NAKTLAD | QHFWSTPYT |
| | | 557 | 558 | 559 | 560 | 561 | 562 |
| 18 | CD8B288 | GYTFTEYTIH | WFYPGNGNMR | YEDNHYYDGASWFAY | RASGNIHNYLA | NAKTLAD | QHFWSTPFT |
| | | 591 | 592 | 593 | 594 | 595 | 596 |
| 19 | CD8B292 | GFNFKDDYIY | WIDPENGATE | HDYGYAMDY | TASSSVSSSYLH | STSNLAS | HQYHRSPLT |
| | | 625 | 626 | 627 | 628 | 629 | 630 |
| 20 | CD8B303 | GFSLSTYSTH | MIWGGGSTD | NPHHYGGSTGAMDY | KASQDIKKYMA | YTSSLQP | LQYDNLFT |
| | | 659 | 660 | 661 | 662 | 663 | 664 |
| 21 | CD8B304 | GFSLSTSGMNVG | HIWWDDDKY | RGNYGNYEFAY | RASQDIRNYLN | HTSRLHS | QQGNTLPWT |
| | | 693 | 694 | 695 | 696 | 697 | 698 |
| 22 | CD8B312 | GYTFTSFWMH | NVDPSDSQTH | STYYRYDGPFTY | RASQSINNNLH | YTSQSIS | QQSNSWPLT |
| | | 727 | 728 | 729 | 730 | 731 | 732 |
| 23 | CD8B347 | GYTFTSYWMN | AVNPSNSYTE | SGLYNTNHLAWFAY | RASGNIHNYLA | NAETLAD | QHFWNNPLT |
| | | 761 | 762 | 763 | 764 | 765 | 766 |
| 24 | CD8B350 | GYTFAAYWIN | SINPSNGYTE | SGLYYTNHLAWCPY | RASGNIHNYLA | NAETLAD | QHFWNSPLT |
| | | 795 | 796 | 797 | 798 | 799 | 800 |
| 25 | CD8B356 | GYSITSGYYWNYI | SYDGSNN | NHGDAMDY | KASQNVGTAVA | SASYRYT | QQYSSYLT |
| | | 829 | 830 | 831 | 832 | 833 | 834 |
| 26 | CD8B369 | GFTFTNTYIS | WIYTGTGGTW | TNWDWYFDV | RASENIYSYLA | YAKTLTD | QHHYGRPYT |
| | | 863 | 864 | 865 | 866 | 867 | 868 |
| 27 | CD8B371 | GFTFSDYYMA | HINYDGSITY | EDYSNYGFAY | HASQNINVWLS | KASNLHT | QQGQSYPLT |
| | | 897 | 898 | 899 | 900 | 901 | 902 |
| 28 | CD8B182 | GYTFTSYWMN | AVNPTNYYTE | SGLYNTNHLAWFAY | RASENIHNYLA | NAKTLAN | QHFWTTPLT |
| | | 931 | 932 | 933 | 934 | 935 | 936 |
| 29 | CD8B205 | GYSFNSYWMH | NIDPSDSETH | VYYSYYSYDATYFDY | RASENIYSYLA | NAKTLAE | QHHYTTPLT |
| | | 965 | 966 | 967 | 968 | 969 | 970 |
| 30 | CD8B223 | GFSLTSYSVH | VIWAGGSTN | HSYYSFDAFDY | KASQNVNTDVA | SASYRYS | QQCNSYPLT |
| | | 999 | 1000 | 1001 | 1002 | 1003 | 1004 |
| 31 | CD8B234 | GYSITSGYYWN | YINYDGRNN | DQGYSKFYFDY | KASEDIYNRLA | GATSLET | QQYWSFPRT |
| | | 1033 | 1034 | 1035 | 1036 | 1037 | 1038 |
| 32 | CD8B251 | GFSLTTYAVH | VIWSGGSTD | HSYYHYNAMDN | KASQNVGTAVA | SASNRYT | QQYSSYPFT |
| | | 1067 | 1068 | 1069 | 1070 | 1071 | 1072 |
| 33 | CD8B269 | GYSITSGYYWN | YISYDGSNN | NHGDAMDH | KASQNVGTDVA | SASYRYS | QQYKSYPLT |
| | | 1101 | 1102 | 1103 | 1104 | 1105 | 1106 |
| 34 | CD8B290 | GFSLSRYSVH | MIWGGGSTD | IYFDNYVGFAY | KASQDVGTVVA | WTSTRHT | QQYSSYPYT |
| | | 1135 | 1136 | 1137 | 1138 | 1139 | 1140 |
| 35 | CD8B310 | GFSLTNYAVH | VIWTDGSTD | NNGYFPAFFAY | RSSQTIVHSNGNTYLE | KVSNRFS | FQGSHAPFT |
| | | 1169 | 1170 | 1171 | 1172 | 1173 | 1174 |
| 36 | CD8B352 | GYSITSGYYWN | YINYDGRNN | DQGYSKFYFDY | KASEDIYNRLA | GATSLET | QQYWSFPRT |
| | | 1203 | 1204 | 1205 | 1206 | 1207 | 1208 |
| 37 | CD8B319 | GYSFTAYYMH | EINPSAGGTT | WTNPFDY | KASQNVGTAVA | SASYRYT | QQYNNYLT |
| | | 1237 | 1238 | 1239 | 1240 | 1241 | 1242 |
| 38 | CD8B194 | GYTFTSYWIN | NIYPGSSSTN | ELGPYYRYSAMVY | KASQNVGTAVA | SASNRYT | QQYSSYPFT |
| | | 1271 | 1272 | 1273 | 1274 | 1275 | 1276 |
| 39 | CD8B231 | GYTFTNYWMH | NIDPSDSETH | GLTGTGHY | RASQDINIYLN | HTSRLHS | QQDNTLPYT |
| | | 1305 | 1306 | 1307 | 1308 | 1309 | 1310 |
| 40 | CD8B238 | GYTFTDYSMD | YIYTYSGGAG | DSSDYEFAY | KASQDIKSYLS | RANRLVD | LQYDEFRT |
| | | 1339 | 1340 | 1341 | 1342 | 1343 | 1344 |
| 41 | CD8B255 | GFSLNTSGMGVS | HIFWDDDKR | RDGYGDYAYFDV | RASENIYSDLA | AATILTD | QHFWGTPWT |
| | | 1373 | 1374 | 1375 | 1376 | 1377 | 1378 |
| 42 | CD8B324 | GYTSTSHWIH | NIYPGSSSTN | HSPGHRDYAMDY | KASQNVGTAVA | SASNRYT | QQYSTYPLT |
| | | 1407 | 1408 | 1409 | 1410 | 1411 | 1412 |
| 43 | CD8B337 | GFSLSTSGMGVS | HIFWDDDRR | RVGYGDYAYFDV | RASENIYSDLA | AATNLAD | QHFWGTPWT |
| | | 1441 | 1442 | 1443 | 1444 | 1445 | 1446 |
| 44 | CD8B344 | GYSFTNYWIN | NIYPGSDSSN | EEADYRYTWFVY | KASQNVGTAVA | SASNRYT | QQYSSYPLT |
| | | 1475 | 1476 | 1477 | 1478 | 1479 | 1480 |
| 45 | CD8B264 | GYSFTSYWIN | NIYPGSSSTN | EEYSYKSSWFAY | KASQNVGTAVA | SASNRYN | QQYSTYPYT |
| | | 1509 | 1510 | 1511 | 1512 | 1513 | 1514 |
| 46 | CD8B318 | GYTFTSYWIS | NIYPGSSSSN | EEYSYFPSWFAY | KASQNVGTAVA | SASNRYT | QQYSTYPFT |
| | | 1543 | 1544 | 1545 | 1546 | 1547 | 1548 |
| 47 | CD8B333 | GYSFASFWIN | NIYPGSSSTN | EEYSYKSSWFAY | KASQNVGTAVA | SASNRYN | QQYSTYPYT |
| | | 1577 | 1578 | 1579 | 1580 | 1581 | 1582 |
| 48 | CD8B366 | GFNIKDDYIH | RIDPANGNPR | DDEGYYYFDV | RASKSISKYLA | SGSTLQS | QQHNEYPLT |
| | | 1611 | 1612 | 1613 | 1614 | 1615 | 1616 |
| 49 | CD8B368 | GYTFTSYWIN | NIYPFSSSTN | EEFSHYPSWFAY | KASQNVGIAVA | SASNRYT | QQYSTDPYT |
| | | 1645 | 1646 | 1647 | 1648 | 1649 | 1650 |
| 50 | CD8B370 | GYTFTSYWIN | NIYPGSSSTN | ELGAYYHYSAMDY | KASQNVGTAVA | SASNRYT | QQYSIYPFT |
| | | 1679 | 1680 | 1681 | 1682 | 1683 | 1684 |
| 51 | CD8B186 | GYIFTSYWMH | NINPSSGYAV | RVFYGDSWFAY | RASGNIHNYLA | NAKTLAD | QHFWSTTWT |
| | | 1713 | 1714 | 1715 | 1716 | 1717 | 1718 |
| 52 | CD8B190 | GYSFTSYYMH | YIDPFNGNTN | PNSNYVGTWFAY | HASQNINVWLS | KASNLHT | QQGQSFPFT |
| | | 1747 | 1748 | 1749 | 1750 | 1751 | 1752 |
| 53 | CD8B192 | GYTFTDYYMN | VINPYNGGTT | NYGAMDS | RASGNIHNYLA | NAKTLAD | QHFWITPPT |
| | | 1781 | 1782 | 1783 | 1784 | 1785 | 1786 |
| 54 | CD8B193 | GYKFTDYYMN | DINPNGGGTS | TSGTDWYFDV | KASQNVGTAVA | SASNRYT | QQYSSYPFT |
| | | 1815 | 1816 | 1817 | 1818 | 1819 | 1820 |
| 55 | CD8B214 | GYTFTTAGIQ | WINTHAGESK | SGDYDGSHPFAY | RASQDIRPYLN | YTSRLHS | QQDNTLPYT |
| | | 1849 | 1850 | 1851 | 1852 | 1853 | 1854 |
| 56 | CD8B230 | GYTFTDYYMN | DINPNGGGTS | TSGTDWYFDV | KASQNVGTAVA | STSNRYT | QQYSIYPFT |
| | | 1883 | 1884 | 1885 | 1886 | 1887 | 1888 |
| 57 | CD8B245 | GFTFTDYYMS | LSRNKGNGYTTE | TVTGTLFYYALDY | RASENIYSYLA | NAKTLAA | QHHYGTPLT |
| | | 1917 | 1918 | 1919 | 1920 | 1921 | 1922 |
| 58 | CD8B248 | GYTFTTYTMH | YINPSSGYTK | LWAY | RSSQSLVHSSGNTYLH | KGSNRFS | SQSTHVPFT |
| | | 1951 | 1952 | 1953 | 1954 | 1955 | 1956 |
| 59 | CD8B250 | GFSLSNYVVH | VIWTDGSTD | NNGYFPAFFAY | KASQNVDTDIT | SASYRYS | QQYNSYPLT |
| | | 1985 | 1986 | 1987 | 1988 | 1989 | 1990 |
| 60 | CD8B254 | GYTFSSYWIT | DIYPGSGSTN | ESITTRITPFDH | RSSQSLVHSSGNTYLH | KGSNRFS | SQSTHVPFT |
| | | 2019 | 2020 | 2021 | 2022 | 2023 | 2024 |
| 61 | CD8B261 | GYTFNSYWIN | NIYPGSSSTN | ELGGYYRYNAMDY | KASQDINRYLS | RANTLVD | LQYDEFPYT |
| | | 2053 | 2054 | 2055 | 2056 | 2057 | 2058 |
| 62 | CD8B311 | GYTFTSYWMH | MIHPNSGSTN | CGYDGAWFAY | SASQGISNCLN | YTSSLHS | QQYSKVPYT |
| | | 2087 | 2088 | 2089 | 2090 | 2091 | 2092 |
| 63 | CD8B340 | GYTFTNYWMQ | EIDPSDTFTN | GDWDRDWYFDV | KSSQSLLYSDGKTYLN | LVSKLDS | LQATHFPHT |
| | | 2121 | 2122 | 2123 | 2124 | 2125 | 2126 |
| 64 | CD8B362 | GFNIKDTYMH | RIDPANGHTK | RFAY | RASHEISGYLS | AASTLDS | LQYSSYPYT |
| | | 2155 | 2156 | 2157 | 2158 | 2159 | 2160 |

TABLE 20
Contact CDR Amino Acid Sequences

| | Protein | HC Contact | | | LC Contact | | |
|---|---|---|---|---|---|---|---|
| # | Name | CDR1 | HC Contact CDR2 | HC Contact CDR3 | CDR1 | LC Contact CDR2 | LC Contact CDR3 |
| 1 | CD8B191 | TDYYMN | WIGRVIPSNGGTI | AREDYNNQGFFLDAMD | SDFLHWY | LLIKYASQSI | QNGHSFPY |
| | | 19 | 20 | 21 | 22 | 23 | 24 |
| 2 | CD8B226 | TDYYMN | WIGRIIPSNGATI | AREDYSNQGFFLDAMD | SHYLHWY | LLIKYASQSI | QNGHSFPY |
| | | 53 | 54 | 55 | 56 | 57 | 58 |
| 3 | CD8B259 | TDYYMN | WIGRVIPSNGGTI | AREDYGNQGFFLDAMD | SHFLHWY | LLIKYASQSI | QSGHSFPY |
| | | 87 | 88 | 89 | 90 | 91 | 92 |
| 4 | CD8B298 | TDYYMN | WIGRVIPNNGGTR | AREDFSNQGFFLDAMD | SDYLHWY | LLIKYASQSI | QNGHSFPY |
| | | 121 | 122 | 123 | 124 | 125 | 126 |
| 5 | CD8B342 | TDYYVN | WIGRVIPNNGNVI | TREDYSNQGFFLDAMD | SNYLHWY | LLIKYASQSI | QNGHSFPY |
| | | 155 | 156 | 157 | 158 | 159 | 160 |
| 6 | CD8B364 | TSYWMH | WIGEINPSNGDSY | TRSMYYDGRAGA | DDDMNWY | LLISEGNTLR | LQSDNMPL |
| | | 189 | 190 | 191 | 192 | 193 | 194 |
| 7 | CD8B200 | TNYWIH | WIGNIDPSDSETH | ASGLTGTGY | SPYLNWY | LLIYYTSKLH | QQDNTLPY |
| | | 223 | 224 | 225 | 226 | 227 | 228 |
| 8 | CD8B247 | TDYYMN | WIGRVIPNNGGTI | AREDYSNQGFFLDAMD | SHFLHWY | LLIKYASQSI | QSGHSFPY |
| | | 257 | 258 | 259 | 260 | 261 | 262 |
| 9 | CD8B265 | TDYYMN | WIGRVIPRNGATT | AREDFSNQGFFLDAMD | SHYLHWY | LLIKYASQSI | QNGHSFPY |
| | | 291 | 292 | 293 | 294 | 295 | 296 |
| 10 | CD8B270 | TNYWMH | WIGNIDPSDSETH | ASGLTGTGY | RPYLNWY | LLIYFTSKLH | QQDNTLPY |
| | | 325 | 326 | 327 | 328 | 329 | 330 |
| 11 | CD8B213 | TDYYMD | WIGYIYPNNGITS | ARSIYYDHGGGFP | DKYVAWY | ALIYSASYRY | QQYNTYP |
| | | 359 | 360 | 361 | 362 | 363 | 364 |
| 12 | CD8B240 | TDYYMN | WIGRVIPSNGGTI | AREDYNNQGFFLDAMD | SDFLHWY | LLIKYASQSI | QNGHSFPY |
| | | 393 | 394 | 395 | 396 | 397 | 398 |
| 13 | CD8B361 | TDYYMD | WIGYIYPNNGDTR | ARSIYYDHGGGFP | GTYVAWY | ALIYSASYRY | QQYNSYP |
| | | 427 | 428 | 429 | 430 | 431 | 432 |
| 14 | CD8B246 | STSGMNVG | WLAHIWWDDDKY | ARRGNYGNYEFA | RNYLNWY | LLIYHTSRLH | QQGNTLPW |
| | | 461 | 462 | 463 | 464 | 465 | 466 |
| 15 | CD8B268 | TVYTIH | WIGWFYPGSGNIK | ARHEDNHYYDGNSWFA | HNYLAWF | LLVYNAKTLA | QHFWNTPY |
| | | 495 | 496 | 497 | 498 | 499 | 500 |
| 16 | CD8B271 | SIYSIH | WLGMIWGGGDTD | ARNPHYYGGTYEYFD | SNYLNWY | LLIYDTSILY | QQYSNLPY |
| | | 529 | 530 | 531 | 532 | 533 | 534 |
| 17 | CD8B273 | TEYTIH | WIGWFYPGTGSIK | ARHEDNHYYDGNSWFA | HNYLAWF | LLVYNAKTLA | QHFWSTPY |
| | | 563 | 564 | 565 | 566 | 567 | 568 |
| 18 | CD8B288 | TEYTIH | WIGWFYPGNGNMR | ARYEDNHYYDGASWFA | HNYLAWF | LLVYNAKTLA | QHFWSTPF |
| | | 597 | 598 | 599 | 600 | 601 | 602 |
| 19 | CD8B292 | KDDYIY | WIGWIDPENGATE | SLHDYGYAMD | SSSYLHWY | LWIYSTSNLA | HQYHRSPL |
| | | 631 | 632 | 633 | 634 | 635 | 636 |
| 20 | CD8B303 | STYSTH | WLGMIWGGGSTD | ARNPHHYGGSTGAMD | KKYMAWY | LLIHYTSSLQ | LQYDNLF |
| | | 665 | 666 | 667 | 668 | 669 | 670 |
| 21 | CD8B304 | STSGMNVG | WLAHIWWDDDKY | ARRGNYGNYEFA | RNYLNWY | LLIYHTSRLH | QQGNTLPW |
| | | 699 | 700 | 701 | 702 | 703 | 704 |
| 22 | CD8B312 | TSFWMH | WIGNVDPSDSQTH | ARSTYYRYDGPFT | NNNLHWY | LLIKYTSQSI | QQSNSWPL |
| | | 733 | 734 | 735 | 736 | 737 | 738 |
| 23 | CD8B347 | TSYWMN | WIGAVNPSNSYTE | ARSGLYNTNHLAWFA | HNYLAWY | LLVFNAETLA | QHFWNNPL |
| | | 767 | 768 | 769 | 770 | 771 | 772 |
| 24 | CD8B350 | AAYWIN | WIGSINPSNGYTE | SRSGLYYTNHLAWCP | HNYLAWY | VLVYNAETLA | QHFWNSPL |
| | | 801 | 802 | 803 | 804 | 805 | 806 |
| 25 | CD8B356 | TSGYYWN | WMGYISYDGSNN | VRNHGDAMD | GTAVAWY | LLIYSASYRY | QQYSSYL |
| | | 835 | 836 | 837 | 838 | 839 | 840 |
| 26 | CD8B369 | TNTYIS | WIAWIYTGTGGTW | ARTNWDWYFD | YSYLAWY | LLVYYAKTLT | QHHYGRPY |
| | | 869 | 870 | 871 | 872 | 873 | 874 |
| 27 | CD8B371 | SDYYMA | WVAHINYDGSITY | AREDYSNYGFA | NVWLSWY | LLIYKASNLH | QQGQSYPL |
| | | 903 | 904 | 905 | 906 | 907 | 908 |
| 28 | CD8B182 | TSYWMN | WIGAVNPTNYYTE | ARSGLYNTNHLAWFA | HNYLAWY | LLVYNAKTLA | QHFWTTPL |
| | | 937 | 938 | 939 | 940 | 941 | 942 |
| 29 | CD8B205 | NSYWMH | WIGNIDPSDSETH | ARVYYSYYSYDATYFD | YSYLAWY | LLVYNAKTLA | QHHYTTPL |
| | | 971 | 972 | 973 | 974 | 975 | 976 |
| 30 | CD8B223 | TSYSVH | WLGVIWAGGSTN | AKHSYYSFDAFD | NTDVAWY | ALIYSASYRY | QQCNSYPL |
| | | 1005 | 1006 | 1007 | 1008 | 1009 | 1010 |
| 31 | CD8B234 | TSGYYWN | WMGYINYDGRNN | SRDQGYSKFYFD | YNRLAWY | LLISGATSLE | QQYWSFPR |
| | | 1039 | 1040 | 1041 | 1042 | 1043 | 1044 |
| 32 | CD8B251 | TTYAVH | WLGVIWSGGSTD | ARHSYYHYNAMD | GTAVAWY | LLIYSASNRY | QQYSSYPF |
| | | 1073 | 1074 | 1075 | 1076 | 1077 | 1078 |
| 33 | CD8B269 | TSGYYWN | WMGYISYDGSNN | VRNHGDAMD | GTDVAWY | ALIYSASYRY | QQYKSYPL |
| | | 1107 | 1108 | 1109 | 1110 | 1111 | 1112 |
| 34 | CD8B290 | SRYSVH | WLGMIWGGGSTD | ARIYFDNYVGFA | GTVVAWY | LLIFWTSTRH | QQYSSYPY |
| | | 1141 | 1142 | 1143 | 1144 | 1145 | 1146 |
| 35 | CD8B310 | TNYAVH | WLGVIWTDGSTD | ARNNGYFPAFFA | VHSNGNTYLEWY | LLMYKVSNRF | FQGSHAPF |
| | | 1175 | 1176 | 1177 | 1178 | 1179 | 1180 |
| 36 | CD8B352 | TSGYYWN | WMGYINYDGRNN | ARDQGYSKFYFD | YNRLAWY | LLISGATSLE | QQYWSFPR |
| | | 1209 | 1210 | 1211 | 1212 | 1213 | 1214 |
| 37 | CD8B319 | TAYYMH | WIGEINPSAGGTT | ARWTNPFD | GTAVAWY | LLIYSASYRY | QQYNNYL |
| | | 1243 | 1244 | 1245 | 1246 | 1247 | 1248 |
| 38 | CD8B194 | TSYWIN | WIGNIYPGSSSTN | ARELGPYYRYSAMV | GTAVAWY | LLIYSASNRY | QQYSSYPF |
| | | 1277 | 1278 | 1279 | 1280 | 1281 | 1282 |
| 39 | CD8B231 | TNYWMH | WIGNIDPSDSETH | ASGLTGTGH | NIYLNWY | CLIYHTSRLH | QQDNTLPY |
| | | 1311 | 1312 | 1313 | 1314 | 1315 | 1316 |
| 40 | CD8B238 | TDYSMD | WIGYIYTYSGGAG | ARDSSDYEFA | KSYLSWF | TLIYRANRLV | LQYDEFR |
| | | 1345 | 1346 | 1347 | 1348 | 1349 | 1350 |
| 41 | CD8B255 | NTSGMGVS | WLAHIFWDDDKR | ARRDGYGDYAYFD | YSDLAWY | LLVYAATILT | QHFWGTPW |
| | | 1379 | 1380 | 1381 | 1382 | 1383 | 1384 |
| 42 | CD8B324 | TSHWIH | WIGNIYPGSSSTN | ARHSPGHRDYAMD | GTAVAWY | LLIASASNRY | QQYSTYPL |
| | | 1413 | 1414 | 1415 | 1416 | 1417 | 1418 |
| 43 | CD8B337 | STSGMGVS | WLAHIFWDDDRR | ARRVGYGDYAYFD | YSDLAWY | LLVYAATNLA | QHFWGTPW |
| | | 1447 | 1448 | 1449 | 1450 | 1451 | 1452 |
| 44 | CD8B344 | TNYWIN | WIGNIYPGSDSSN | AREEADYRYTWFV | GTAVAWY | LLIYSASNRY | QQYSSYPL |
| | | 1481 | 1482 | 1483 | 1484 | 1485 | 1486 |
| 45 | CD8B264 | TSYWIN | WIGNIYPGSSSTN | AREEYSYKSSWFA | GTAVAWY | LLIYSASNRY | QQYSTYPY |
| | | 1515 | 1516 | 1517 | 1518 | 1519 | 1520 |
| 46 | CD8B318 | TSYWIS | WIGNIYPGSSSSN | AREEYSYFPSWFA | GTAVAWF | LLIYSASNRY | QQYSTYPF |
| | | 1549 | 1550 | 1551 | 1552 | 1553 | 1554 |
| 47 | CD8B333 | ASFWIN | WIGNIYPGSSSTN | AREEYSYKSSWFA | GTAVAWY | LLIYSASNRY | QQYSTYPY |
| | | 1583 | 1584 | 1585 | 1586 | 1587 | 1588 |
| 48 | CD8B366 | KDDYIH | WIGRIDPANGNPR | ARDDEGYYYFD | SKYLAWY | VLIYSGSTLQ | QQHNEYPL |
| | | 1617 | 1618 | 1619 | 1620 | 1621 | 1622 |
| 49 | CD8B368 | TSYWIN | WIGNIYPFSSSTN | AREEFSHYPSWFA | GIAVAWF | LLIYSASNRY | QQYSTDPY |
| | | 1651 | 1652 | 1653 | 1654 | 1655 | 1656 |
| 50 | CD8B370 | TSYWIN | WIGNIYPGSSSTN | TRELGAYYHYSAMD | GTAVAWY | LLIYSASNRY | QQYSIYPF |
| | | 1685 | 1686 | 1687 | 1688 | 1689 | 1690 |
| 51 | CD8B186 | TSYWMH | WIGNINPSSGYAV | ARRVFYGDSWFA | HNYLAWY | LLVYNAKTLA | QHFWSTTW |
| | | 1719 | 1720 | 1721 | 1722 | 1723 | 1724 |
| 52 | CD8B190 | TSYYMH | WIGYIDPFNGNTN | ASPNSNYVGTWFA | NVWLSWY | LLIYKASNLH | QQGQSFPF |
| | | 1753 | 1754 | 1755 | 1756 | 1757 | 1758 |
| 53 | CD8B192 | TDYYMN | WIGVINPYNGGTT | ARNYGAMD | HNYLAWY | LLVSNAKTLA | QHFWITPP |
| | | 1787 | 1788 | 1789 | 1790 | 1791 | 1792 |
| 54 | CD8B193 | TDYYMN | WIGDINPNGGGTS | ARTSGTDWYFD | GTAVAWY | LLIYSASNRY | QQYSSYPF |
| | | 1821 | 1822 | 1823 | 1824 | 1825 | 1826 |
| 55 | CD8B214 | TTAGIQ | WIGWINTHAGESK | ARSGDYDGSHPFA | RPYLNWY | LLIYYTSRLH | QQDNTLPY |
| | | 1855 | 1856 | 1857 | 1858 | 1859 | 1860 |
| 56 | CD8B230 | TDYYMN | WIGDINPNGGGTS | ARTSGTDWYFD | GTAVAWY | LLIYSTSNRY | QQYSIYPF |
| | | 1889 | 1890 | 1891 | 1892 | 1893 | 1894 |
| 57 | CD8B245 | TDYYMS | WLALSRNKGNGYTTE | ARTVTGTLFYYALD | YSYLAWY | FLVYNAKTLA | QHHYGTPL |
| | | 1923 | 1924 | 1925 | 1926 | 1927 | 1928 |
| 58 | CD8B248 | TTYTMH | WIGYINPSSGYTK | ARLWA | VHSSGNTYLHWY | LLIYKGSNRF | SQSTHVPF |
| | | 1957 | 1958 | 1959 | 1960 | 1961 | 1962 |
| 59 | CD8B250 | SNYVVH | WLGVIWTDGSTD | ARNNGYFPAFFA | DTDITWY | ALIYSASYRY | QQYNSYPL |
| | | 1991 | 1992 | 1993 | 1994 | 1995 | 1996 |
| 60 | CD8B254 | SSYWIT | WVGDIYPGSGSTN | ARESITTRITPFD | VHSSGNTYLHWY | LLIYKGSNRF | SQSTHVPF |
| | | 2025 | 2026 | 2027 | 2028 | 2029 | 2030 |
| 61 | CD8B261 | NSYWIN | WIGNIYPGSSSTN | ARELGGYYRYNAMD | NRYLSWF | TLIYRANTLV | LQYDEFPY |
| | | 2059 | 2060 | 2061 | 2062 | 2063 | 2064 |
| 62 | CD8B311 | TSYWMH | WIGMIHPNSGSTN | ARCGYDGAWFA | SNCLNWY | LLIHYTSSLH | QQYSKVPY |
| | | 2093 | 2094 | 2095 | 2096 | 2097 | 2098 |
| 63 | CD8B340 | TNYWMQ | WIGEIDPSDTFTN | ARGDWDRDWYFD | LYSDGKTYLNWL | LLIYLVSKLD | LQATHFPH |
| | | 2127 | 2128 | 2129 | 2130 | 2131 | 2132 |
| 64 | CD8B362 | KDTYMH | WIGRIDPANGHTK | AIRFA | SGYLSWL | RLIYAASTLD | LQYSSYPY |
| | | 2161 | 2162 | 2163 | 2164 | 2165 | 2166 |

TABLE 21
IMGT CDR Amino Acid Sequences

| | Protein | | HC IMGT | | | LC IMGT | |
|---|---|---|---|---|---|---|---|
| # | Name | HC IMGT CDR1 | CDR2 | HC IMGT CDR3 | LC IMGT CDR1 | CDR2 | LC IMGT CDR3 |
| 1 | CD8B191 | GYTFTDYY | VIPSNGGT | AREDYNNQGFFLDAMDY | QSISDF | YAS | QNGHSFPYT |
| | | 25 | 26 | 27 | 28 | 29 | 30 |
| 2 | CD8B226 | GYTFTDYY | IIPSNGAT | AREDYSNQGFFLDAMDY | QSISHY | YAS | QNGHSFPYT |
| | | 59 | 60 | 61 | 62 | 63 | 64 |
| 3 | CD8B259 | GYTFTDYY | VIPSNGGT | AREDYGNQGFFLDAMDY | QSISHF | YAS | QSGHSFPYT |
| | | 93 | 94 | 95 | 96 | 97 | 98 |
| 4 | CD8B298 | GYTFTDYY | VIPNNGGT | AREDFSNQGFFLDAMDY | QTISDY | YAS | QNGHSFPYT |
| | | 127 | 128 | 129 | 130 | 131 | 132 |
| 5 | CD8B342 | GYTFTDYY | VIPNNGNV | TREDYSNQGFFLDAMDY | QTISNY | YAS | QNGHSFPYT |
| | | 161 | 162 | 163 | 164 | 165 | 166 |
| 6 | CD8B364 | GYTFTSYW | INPSNGDS | TRSMYYDGRAGAY | TDIDDD | EGN | LQSDNMPLT |
| | | 195 | 196 | 197 | 198 | 199 | 200 |
| 7 | CD8B200 | GYTFTNYW | IDPSDSET | ASGLTGTGYY | QDISPY | YTS | QQDNTLPYT |
| | | 229 | 230 | 231 | 232 | 233 | 234 |
| 8 | CD8B247 | GYTFTDYY | VIPNNGGT | AREDYSNQGFFLDAMDY | QTISHF | YAS | QSGHSFPYT |
| | | 263 | 264 | 265 | 266 | 267 | 268 |
| 9 | CD8B265 | GYSFTDYY | VIPRNGAT | AREDFSNQGFFLDAMDY | QSISHY | YAS | QNGHSFPYT |
| | | 297 | 298 | 299 | 300 | 301 | 302 |
| 10 | CD8B270 | GYTFTNYW | IDPSDSET | ASGLTGTGYY | QDIRPY | FTS | QQDNTLPYT |
| | | 331 | 332 | 333 | 334 | 335 | 336 |
| 11 | CD8B213 | GYIFTDYY | IYPNNGIT | ARSIYYDHGGGFPY | QNVDKY | SAS | QQYNTYPS |
| | | 365 | 366 | 367 | 368 | 369 | 370 |
| 12 | CD8B240 | GYTFTDYY | VIPSNGGT | AREDYNNQGFFLDAMDY | QSISDF | YAS | QNGHSFPYT |
| | | 399 | 400 | 401 | 402 | 403 | 404 |
| 13 | CD8B361 | GYTFTDYY | IYPNNGDT | ARSIYYDHGGGFPY | QNVGTY | SAS | QQYNSYPT |
| | | 433 | 434 | 435 | 436 | 437 | 438 |
| 14 | CD8B246 | GFSLSTSGMN | IWWDDDK | ARRGNYGNYEFAY | QDIRNY | HTS | QQGNTLPWT |
| | | 467 | 468 | 469 | 470 | 471 | 472 |
| 15 | CD8B268 | GYTFTVYT | FYPGSGNI | ARHEDNHYYDGNSWFAY | GNIHNY | NAK | QHFWNTPYT |
| | | 501 | 502 | 503 | 504 | 505 | 506 |
| 16 | CD8B271 | GFSLSIYS | IWGGGDT | ARNPHYYGGTYEYFDV | QGISNY | DTS | QQYSNLPYT |
| | | 535 | 536 | 537 | 538 | 539 | 540 |
| 17 | CD8B273 | GYTFTEYT | FYPGTGSI | ARHEDNHYYDGNSWFAY | GNIHNY | NAK | QHFWSTPYT |
| | | 569 | 570 | 571 | 572 | 573 | 574 |
| 18 | CD8B288 | GYTFTEYT | FYPGNGNM | ARYEDNHYYDGASWFAY | GNIHNY | NAK | QHFWSTPFT |
| | | 603 | 604 | 605 | 606 | 607 | 608 |
| 19 | CD8B292 | GFNFKDDY | IDPENGAT | SLHDYGYAMDY | SSVSSSY | STS | HQYHRSPLT |
| | | 637 | 638 | 639 | 640 | 641 | 642 |
| 20 | CD8B303 | GFSLSIYS | IWGGGST | ARNPHHYGGSTGAMDY | QDIKKY | YTS | LQYDNLFT |
| | | 671 | 672 | 673 | 674 | 675 | 676 |
| 21 | CD8B304 | GFSLSTSGMN | IWWDDDK | ARRGNYGNYEFAY | QDIRNY | HTS | QQGNTLPWT |
| | | 705 | 706 | 707 | 708 | 709 | 710 |
| 22 | CD8B312 | GYTFTSFW | VDPSDSQT | ARSTYYRYDGPFTY | QSINNN | YTS | QQSNSWPLT |
| | | 739 | 740 | 741 | 742 | 743 | 744 |
| 23 | CD8B347 | GYTFTSYW | VNPSNSYT | ARSGLYNTNHLAWFAY | GNIHNY | NAE | QHFWNNPLT |
| | | 773 | 774 | 775 | 776 | 777 | 778 |
| 24 | CD8B350 | GYTFAAYW | INPSNGYT | SRSGLYYTNHLAWCPY | GNIHNY | NAE | QHFWNSPLT |
| | | 807 | 808 | 809 | 810 | 811 | 812 |
| 25 | CD8B356 | GYSITSGYY | ISYDGSN | VRNHGDAMDY | QNVGTA | SAS | QQYSSYLT |
| | | 841 | 842 | 843 | 844 | 845 | 846 |
| 26 | CD8B369 | GFTFTNTY | IYTGTGGT | ARTNWDWYFDV | ENIYSY | YAK | QHHYGRPYT |
| | | 875 | 876 | 877 | 878 | 879 | 880 |
| 27 | CD8B371 | GFTFSDYY | INYDGSIT | AREDYSNYGFAY | QNINVW | KAS | QQGQSYPLT |
| | | 909 | 910 | 911 | 912 | 913 | 914 |
| 28 | CD8B182 | GYTFTSYW | VNPTNYYT | ARSGLYNTNHLAWFAY | ENIHNY | NAK | QHFWTTPLT |
| | | 943 | 944 | 945 | 946 | 947 | 948 |
| 29 | CD8B205 | GYSFNSYW | IDPSDSET | ARVYYSYYSYDATYFDY | ENIYSY | NAK | QHHYTTPLT |
| | | 977 | 978 | 979 | 980 | 981 | 982 |
| 30 | CD8B223 | GFSLTSYS | IWAGGST | AKHSYYS FDAFDY | QNVNTD | SAS | QQCNSYPLT |
| | | 1011 | 1012 | 1013 | 1014 | 1015 | 1016 |
| 31 | CD8B234 | GYSITSGYY | INYDGRN | SRDQGYSKFYFDY | EDIYNR | GAT | QQYWSFPRT |
| | | 1045 | 1046 | 1047 | 1048 | 1049 | 1050 |
| 32 | CD8B251 | GFSLTTYA | IWSGGST | ARHSYYHYNAMDN | QNVGTA | SAS | QQYSSYPFT |
| | | 1079 | 1080 | 1081 | 1082 | 1083 | 1084 |
| 33 | CD8B269 | GYSITSGYY | ISYDGSN | VRNHGDAMDH | QNVGTD | SAS | QQYKSYPLT |
| | | 1113 | 1114 | 1115 | 1116 | 1117 | 1118 |
| 34 | CD8B290 | GFSLSRYS | IWGGGST | ARIYFDNYVGFAY | QDVGTV | WTS | QQYSSYPYT |
| | | 1147 | 1148 | 1149 | 1150 | 1151 | 1152 |
| 35 | CD8B310 | GFSLTNYA | IWTDGST | ARNNGYFPAFFAY | QTIVHSNGNTY | KVS | FQGSHAPFT |
| | | 1181 | 1182 | 1183 | 1184 | 1185 | 1186 |
| 36 | CD8B352 | GYSITSGYY | INYDGRN | ARDQGYSKFYFDY | EDIYNR | GAT | QQYWSFPRT |
| | | 1215 | 1216 | 1217 | 1218 | 1219 | 1220 |
| 37 | CD8B319 | GYSFTAYY | INPSAGGT | ARWTNPFDY | QNVGTA | SAS | QQYNNYLT |
| | | 1249 | 1250 | 1251 | 1252 | 1253 | 1254 |
| 38 | CD8B194 | GYTFTSYW | IYPGSSST | ARELGPYYRYSAMVY | QNVGTA | SAS | QQYSSYPFT |
| | | 1283 | 1284 | 1285 | 1286 | 1287 | 1288 |
| 39 | CD8B231 | GYTFTNYW | IDPSDSET | ASGLTGTGHY | QDINIY | HTS | QQDNTLPYT |
| | | 1317 | 1318 | 1319 | 1320 | 1321 | 1322 |
| 40 | CD8B238 | GYTFTDYS | IYTYSGGA | ARDSSDYEFAY | QDIKSY | RAN | LQYDEFRT |
| | | 1351 | 1352 | 1353 | 1354 | 1355 | 1356 |
| 41 | CD8B255 | GFSLNTSGMG | IFWDDDK | ARRDGYGDYAYFDV | ENIYSD | AAT | QHFWGTPWT |
| | | 1385 | 1386 | 1387 | 1388 | 1389 | 1390 |
| 42 | CD8B324 | GYTSTSHW | IYPGSSST | ARHSPGHRDYAMDY | QNVGTA | SAS | QQYSTYPLT |
| | | 1419 | 1420 | 1421 | 1422 | 1423 | 1424 |
| 43 | CD8B337 | GFSLSTSGMG | IFWDDDR | ARRVGYGDYAYFDV | ENIYSD | AAT | QHFWGTPWT |
| | | 1453 | 1454 | 1455 | 1456 | 1457 | 1458 |
| 44 | CD8B344 | GYSFTNYW | IYPGSDSS | AREEADYRYTWFVY | QNVGTA | SAS | QQYSSYPLT |
| | | 1487 | 1488 | 1489 | 1490 | 1491 | 1492 |
| 45 | CD8B264 | GYSFTSYW | IYPGSSST | AREEYSYKSSWFAY | QNVGTA | SAS | QQYSTYPYT |
| | | 1521 | 1522 | 1523 | 1524 | 1525 | 1526 |
| 46 | CD8B318 | GYTFTSYW | IYPGSSSS | AREEYSYFPSWFAY | QNVGTA | SAS | QQYSTYPFT |
| | | 1555 | 1556 | 1557 | 1558 | 1559 | 1560 |
| 47 | CD8B333 | GYSFASFW | IYPGSSST | AREEYSYKSSWFAY | QNVGTA | SAS | QQYSTYPYT |
| | | 1589 | 1590 | 1591 | 1592 | 1593 | 1594 |
| 48 | CD8B366 | GFNIKDDY | IDPANGNP | ARDDEGYYYFDV | KSISKY | SGS | QQHNEYPLT |
| | | 1623 | 1624 | 1625 | 1626 | 1627 | 1628 |
| 49 | CD8B368 | GYTFTSYW | IYPFSSST | AREEFSHYPSWFAY | QNVGIA | SAS | QQYSTDPYT |
| | | 1657 | 1658 | 1659 | 1660 | 1661 | 1662 |
| 50 | CD8B370 | GYTFTSYW | IYPGSSST | TRELGAYYHYSAMDY | QNVGTA | SAS | QQYSIYPFT |
| | | 1691 | 1692 | 1693 | 1694 | 1695 | 1696 |
| 51 | CD8B186 | GYIFTSYW | INPSSGYA | ARRVFYGDSWFAY | GNIHNY | NAK | QHFWSTTWT |
| | | 1725 | 1726 | 1727 | 1728 | 1729 | 1730 |
| 52 | CD8B190 | GYSFTSYY | IDPFNGNT | ASPNSNYVGTWFAY | QNINVW | KAS | QQGQSFPFT |
| | | 1759 | 1760 | 1761 | 1762 | 1763 | 1764 |
| 53 | CD8B192 | GYTFTDYY | INPYNGGT | ARNYGAMDS | GNIHNY | NAK | QHFWITPPT |
| | | 1793 | 1794 | 1795 | 1796 | 1797 | 1798 |
| 54 | CD8B193 | GYKFTDYY | INPNGGGT | ARTSGTDWYFDV | QNVGTA | SAS | QQYSSYPFT |
| | | 1827 | 1828 | 1829 | 1830 | 1831 | 1832 |
| 55 | CD8B214 | GYTFTTAG | INTHAGES | ARSGDYDGSHPFAY | QDIRPY | YTS | QQDNTLPYT |
| | | 1861 | 1862 | 1863 | 1864 | 1865 | 1866 |
| 56 | CD8B230 | GYTFTDYY | INPNGGGT | ARTSGTDWYFDV | QNVGTA | STS | QQYSIYPFT |
| | | 1895 | 1896 | 1897 | 1898 | 1899 | 1900 |
| 57 | CD8B245 | GFTFTDYY | SRNKGNGYTT | ARTVTGTLFYYALDY | ENIYSY | NAK | QHHYGTPLT |
| | | 1929 | 1930 | 1931 | 1932 | 1933 | 1934 |
| 58 | CD8B248 | GYTFTTYT | INPSSGYT | ARLWAY | QSLVHSSGNTY | KGS | SQSTHVPFT |
| | | 1963 | 1964 | 1965 | 1966 | 1967 | 1968 |
| 59 | CD8B250 | GFSLSNYV | IWTDGST | ARNNGYFPAFFAY | QNVDTD | SAS | QQYNSYPLT |
| | | 1997 | 1998 | 1999 | 2000 | 2001 | 2002 |
| 60 | CD8B254 | GYTFSSYW | IYPGSGST | ARESITTRITPFDH | QSLVHSSGNTY | KGS | SQSTHVPFT |
| | | 2031 | 2032 | 2033 | 2034 | 2035 | 2036 |
| 61 | CD8B261 | GYTFNSYW | IYPGSSST | ARELGGYYRYNAMDY | QDINRY | RAN | LQYDEFPYT |
| | | 2065 | 2066 | 2067 | 2068 | 2069 | 2070 |
| 62 | CD8B311 | GYTFTSYW | IHPNSGST | ARCGYDGAWFAY | QGISNC | YTS | QQYSKVPYT |
| | | 2099 | 2100 | 2101 | 2102 | 2103 | 2104 |
| 63 | CD8B340 | GYTFTNYW | IDPSDTFT | ARGDWDRDWYFDV | QSLLYSDGKTY | LVS | LQATHFPHT |
| | | 2133 | 2134 | 2135 | 2136 | 2137 | 2138 |
| 64 | CD8B362 | GFNIKDTY | IDPANGHT | AIRFAY | HEISGY | AAS | LQYSSYPYT |
| | | 2167 | 2168 | 2169 | 2170 | 2171 | 2172 |

[0691] 4.2: Evaluation of Binding to Human CD8+ T Cells and Biophysical Characterization of CD8 Antibodies

[0692] Cell binding: Twenty nM antibody was incubated with human pan T cell in assay media (RPMI 1640+10% HI FBS+ Pen/strep) for 1 hour at 37° C. Secondary antibodies were A647-conjugated goat anti human IgG Fc antibody at 2 μg/mL, and A488-conjugated mouse anti-human CD4 at 1 μg/mL in staining buffer. Live cells were also gated based on OKT8 control mAb binding. Percent CD8 positive population was calculated by percentage of CD8-positive cell count/live cell count. Results are shown in Table 22 and are reported as Geomean ratios from CD4-negative population (% CD8-positive population).

[0693] Cross-interaction chromatography (CIC): CIC was conducted as previously described (Jacobs et al. (2010) Pharm. Res. 27(1):65-71). Results are shown in Table 22.

[0694] Thermal unfolding and aggregation (Tm/Tagg): Thermal unfolding and aggregation was measured 20° C.-95° C. in 1 C/min ramp using Nanodsf Nanotemper's PROMETHIUSNT.48 instrument. Samples of 20 μL (0.2 mg/mL) in PBS buffer were transferred to 384-well plate in duplicate. Data was analyzed using PR.THERMCONTROL software. Results are shown in Table 22.

TABLE 22
Antibody Stability and Binding to Human Pan T Cells

| | | Cell Binding | | | |
|---|---|---|---|---|---|
| | | to Human PanT | CIC | | |
| | | Signal/Background | Peak | Protein Stability | |
| | Protein | (of CD4 negative | Retention | Tm1 | Tagg |
| # | Name | population) | Time | (° C.) | (° C.) |
| 1 | CD8B191 | 2440 | 4.32 | 70.3 | 76.6 |
| 2 | CD8B226 | 1752 | 4.34 | 70.2 | 78.0 |
| 3 | CD8B259 | 1934 | 4.41 | 70.5 | 76.8 |
| 4 | CD8B298 | 306 | 4.29 | 70.6 | 76.2 |
| 5 | CD8B342 | 1324 | 4.27 | 67.5 | 68.7 |
| 6 | CD8B364 | 1562 | 4.24 | 65.3 | 70.7 |
| 7 | CD8B200 | 1990 | 4.23 | 69.3 | 82.3 |
| 8 | CD8B247 | 1646 | 4.31 | 70.1 | 77.4 |
| 9 | CD8B265 | 2076 | 4.39 | 70.3 | 79.0 |
| 10 | CD8B270 | 2497 | 4.32 | 70.1 | 79.7 |
| 11 | CD8B213 | 827 | 4.51 | 67.8 | 69.9 |
| 12 | CD8B240 | 1312 | 4.30 | 70.0 | 81.5 |
| 13 | CD8B361 | 1051 | 4.65 | 71.1 | 74.4 |
| 14 | CD8B246 | 1112 | 4.47 | 60.9 | 63.1 |
| 15 | CD8B268 | 1173 | 4.44 | 69.6 | 72.4 |
| 16 | CD8B271 | 911 | 4.34 | 69.1 | 80.4 |
| 17 | CD8B273 | 938 | 4.27 | 73.0 | 76.9 |
| 18 | CD8B288 | 934 | 4.32 | 71.0 | 73.5 |
| 19 | CD8B292 | 910 | 4.23 | 68.1 | 69.2 |
| 20 | CD8B303 | 1182 | 4.37 | 70.2 | 79.9 |
| 21 | CD8B304 | 923 | 4.43 | 64.4 | 66.4 |
| 22 | CD8B312 | 1087 | 4.29 | 71.3 | 78.0 |
| 23 | CD8B347 | 1201 | 4.30 | 71.1 | 73.1 |
| 24 | CD8B350 | 537 | 4.61 | | 81.3 |
| 25 | CD8B356 | 777 | 4.46 | 73.9 | 76.7 |
| 26 | CD8B369 | 685 | 5.83 | 67.4 | 76.2 |
| 27 | CD8B371 | 64 | 4.29 | 69.1 | 75.0 |
| 28 | CD8B182 | 1490 | 4.58 | 70.7 | 77.8 |
| 29 | CD8B205 | 655 | 4.77 | 68.9 | 72.2 |
| 30 | CD8B223 | 489 | 4.46 | 68.3 | 74.3 |
| 31 | CD8B234 | 856 | 5.16 | 67.7 | 69.0 |
| 32 | CD8B251 | 37 | 5.30 | 69.4 | 73.0 |
| 33 | CD8B269 | 26 | 4.28 | 69.8 | 81.4 |
| 34 | CD8B290 | 1155 | 4.48 | 60.5 | 72.0 |
| 35 | CD8B310 | 29 | 4.32 | 70.7 | 78.7 |
| 36 | CD8B352 | 827 | 5.56 | 72.1 | 72.6 |
| 37 | CD8B319 | 16 | 4.54 | 64.8 | 75.6 |
| 38 | CD8B194 | 1972 | 4.81 | 69.8 | 87.2 |
| 39 | CD8B231 | 1785 | 4.19 | 61.7 | 77.5 |
| 40 | CD8B238 | 1 | 4.38 | 69.9 | 78.3 |
| 41 | CD8B255 | 1317 | 4.25 | 69.5 | 78.4 |
| 42 | CD8B324 | 1611 | 4.44 | 66.9 | 68.9 |
| 43 | CD8B337 | 1983 | 4.42 | 68.8 | 73.2 |
| 44 | CD8B344 | 1758 | 4.26 | 72.4 | 75.4 |
| 45 | CD8B264 | 122 | 4.34 | 70.0 | 87.2 |
| 46 | CD8B318 | 1613 | 4.78 | | 78.0 |
| 47 | CD8B333 | 1843 | 4.24 | 70.4 | 85.0 |
| 48 | CD8B366 | 318 | 4.26 | 71.8 | 74.9 |
| 49 | CD8B368 | 2007 | 4.46 | 70.5 | 74.7 |
| 50 | CD8B370 | 1932 | 4.69 | 70.1 | 86.9 |
| 51 | CD8B186 | 36 | 4.94 | 65.1 | 66.4 |
| 52 | CD8B190 | 44 | 4.34 | 67.9 | 77.0 |
| 53 | CD8B192 | 22 | 4.84 | 70.2 | 79.9 |
| 54 | CD8B193 | 641 | 5.48 | 70.3 | 79.6 |
| 55 | CD8B214 | 232 | 4.16 | 68.1 | 73.9 |
| 56 | CD8B230 | 63 | 4.88 | 69.6 | 82.5 |
| 57 | CD8B245 | 44 | 4.36 | 66.7 | 68.3 |
| 58 | CD8B248 | 20 | 4.57 | 68.4 | 73.8 |
| 59 | CD8B250 | 61 | 4.42 | 69.9 | 79.3 |
| 60 | CD8B254 | 23 | 4.22 | 65.8 | 69.8 |
| 61 | CD8B261 | 34 | 4.52 | 70.5 | 79.0 |
| 62 | CD8B311 | 1 | 4.28 | 69.8 | 78.0 |
| 63 | CD8B340 | 8 | 4.21 | 64.8 | 78.0 |
| 64 | CD8B362 | 4 | 4.37 | 69.6 | 76.0 |

[0695] Protein binding kinetics by surface plasmon resonance (SPR). All 64 mAbs were captured at 1 μg/ml, with a final capture level ranging from 100 to 400 Rus. Binding to human CD8αβ heterodimer (R&D cat #9358-CD) and hCD8αα homodimer (Table 23) at 11.1 nM, 33.3 nM and 100 nM was measured using a single cycle kinetics method with an association and dissociation of 3 and 10 minutes, respectively, using a flow rate of 50 μL/mL. Biacore 8k was utilized for these assays, and data was analyzed by modeling to a 1:1 binding equation. Results are shown in Table 24.

TABLE 23
CD8αα screening reagents

| | | | SEQ |
|---|---|---|---|
| | Protein | | ID |
| Name | ID | Sequence | NO |
| Human | hCDaa | MAWVWTLLFLMAAAQSIQASQFRVSPLDR | 2179 |
| CD8αα | | TWNLGETVELKCQVLLSNPTSGCSWLFQP | |
| fused to | | RGAAASPTFLLYLSQNKPKAAEGLDTQRF | |
| human Fc | | SGKRLGDTFVLTLSDFRRENEGYYFCSAL | |
| | | SNSIMYFSHFVPVFLPAKPTTTPAPRPPT | |
| | | PAPTIASQPLSLRPEACRPAAGGAVHTRG | |
| | | LDFACDEPKSCDKTHTCPPCPAPELLGGP | |
| | | SVFLFPPKPKDTLMISRTPEVICVVVDVS | |
| | | HEDPEVKFNWYVDGVEVHNAKTKPREEQY | |
| | | NSTYRVVSVLTVLHQDWLNGKEYKCKVSN | |
| | | KALPAPIEKTISKAKGQPREPQVYTLPPS | |
| | | RDELTKNQVSLTCLVKGFYPSDIAVEWES | |
| | | NGQPENNYKTTPPVLDSDGSFFLYSKLTV | |
| | | DKSRWQQGNVFSCSVMHEALHNHYTQKSL | |
| | | SLSPGK | |

TABLE 24
Antibody Binding by SPR

| | | | | | | Protein binding by SPR | | | | |
|---|---|---|---|---|---|---|---|---|---|---|
| | | Protein binding by SPR | | | | to human CD8 αβ heterodimer | | | | Based on |
| | | to human CD8αα homodimer | | | | hCD8αβ | hCD8α | hCD8αβ | | SPR Data |
| | Protein | ka | kd | KD | | ka | kd | KD | hCD8αβ | Predicted |
| # | Name | (1/Ms) | (1/s) | (M) | Comment | (1/Ms) | (1/s) | (M) | Comment | Epitope |
| 1 | CD8B191 | 1.23E+05 | 1.19E−04 | 9.68E−10 | | 1.23E+05 | 1.19E−04 | 9.68E−10 | | CD8 α |
| 2 | CD8B226 | 1.55E+05 | 3.42E−04 | 2.21E−09 | | 1.55E+05 | 3.42E−04 | 2.21E−09 | | CD8 α |
| 3 | CD8B259 | 2.09E+05 | 2.52E−04 | 1.20E−09 | | 2.09E+05 | 2.52E−04 | 1.20E−09 | | CD8 α |
| 4 | CD8B298 | 1.32E+05 | 2.11E−04 | 1.60E−09 | | 1.32E+05 | 2.11E−04 | 1.60E−09 | | CD8 α |
| 5 | CD8B342 | 1.48E+05 | 3.84E−04 | 2.59E−09 | | 1.48E+05 | 3.84E−04 | 2.59E−09 | | CD8 α |
| 6 | CD8B364 | 1.43E+06 | 3.12E−02 | 2.19E−08 | | 1.43E+06 | 3.12E−02 | 2.19E−08 | | CD8 α |
| 7 | CD8B200 | 3.32E+06 | 1.26E−04 | 3.80E−11 | | 3.32E+06 | 1.26E−04 | 3.80E−11 | | CD8 α |
| 8 | CD8B247 | 2.73E+05 | 2.81E−04 | 1.03E−09 | | 2.73E+05 | 2.81E−04 | 1.03E−09 | | CD8 α |
| 9 | CD8B265 | 1.68E+05 | 1.33E−04 | 7.91E−10 | | 1.68E+05 | 1.33E−04 | 7.91E−10 | | CD8 α |
| 10 | CD8B270 | 2.41E+06 | 9.47E−05 | 3.93E−11 | | 2.41E+06 | 9.47E−05 | 3.93E−11 | | CD8 α |
| 11 | CD8B213 | — | — | — | Poor Fit, ~5 | — | — | — | Poor Fit, ~5 | CD8 α |
| | | | | | nM | | | | nM | |
| 12 | CD8B240 | — | — | — | Poor Fit, ~1 | — | — | — | Poor Fit, ~1 | CD8 α |
| | | | | | nM | | | | nM | |
| 13 | CD8B361 | — | — | — | Poor Fit, ~1 | — | — | — | Poor Fit, ~1 | CD8 α |
| | | | | | nM | | | | nM | |
| 14 | CD8B246 | — | — | — | Low/No | — | — | — | Low/No | CD8 β |
| | | | | | Binding | | | | Binding | |
| 15 | CD8B268 | — | — | — | Low/No | — | — | — | Low/No | CD8 β |
| | | | | | Binding | | | | Binding | |
| 16 | CD8B271 | — | — | — | Low/No | — | — | — | Low/No | CD8 β |
| | | | | | Binding | | | | Binding | |
| 17 | CD8B273 | — | — | — | Low/No | — | — | — | Low/No | CD8 β |
| | | | | | Binding | | | | Binding | |
| 18 | CD8B288 | — | — | — | Low/No | — | — | — | Low/No | CD8 β |
| | | | | | Binding | | | | Binding | |
| 19 | CD8B292 | — | — | — | Low/No | — | — | — | Low/No | CD8 β |
| | | | | | Binding | | | | Binding | |
| 20 | CD8B303 | — | — | — | Low/No | — | — | — | Low/No | CD8 β |
| | | | | | Binding | | | | Binding | |
| 21 | CD8B304 | — | — | — | Low/No | — | — | — | Low/No | CD8 β |
| | | | | | Binding | | | | Binding | |
| 22 | CD8B312 | — | — | — | Low/No | — | — | — | Low/No | CD8 β |
| | | | | | Binding | | | | Binding | |
| 23 | CD8B347 | — | — | — | Low/No | — | — | — | Low/No | CD8 β |
| | | | | | Binding | | | | Binding | |
| 24 | CD8B350 | — | — | — | Low/No | — | — | — | Low/No | CD8 β |
| | | | | | Binding | | | | Binding | |
| 25 | CD8B356 | — | — | — | Low/No | — | — | — | Low/No | CD8 β |
| | | | | | Binding | | | | Binding | |
| 26 | CD8B369 | — | — | — | Low/No | — | — | — | Low/No | CD8 β |
| | | | | | Binding | | | | Binding | |
| 27 | CD8B371 | — | — | — | Low/No | — | — | — | Low/No | CD8 β |
| | | | | | Binding | | | | Binding | |
| 28 | CD8B182 | — | — | — | Low/No | — | — | — | Low/No | CD8 β |
| | | | | | Binding | | | | Binding | |
| 29 | CD8B205 | — | — | — | Low/No | — | — | — | Low/No | CD8 β |
| | | | | | Binding | | | | Binding | |
| 30 | CD8B223 | — | — | — | Low/No | — | — | — | Low/No | CD8 β |
| | | | | | Binding | | | | Binding | |
| 31 | CD8B234 | — | — | — | Low/No | — | — | — | Low/No | CD8 β |
| | | | | | Binding | | | | Binding | |
| 32 | CD8B251 | — | — | — | Low/No | — | — | — | Low/No | CD8 β |
| | | | | | Binding | | | | Binding | |
| 33 | CD8B269 | — | — | — | Low/No | — | — | — | Low/No | CD8 β |
| | | | | | Binding | | | | Binding | |
| 34 | CD8B290 | — | — | — | Low/No | — | — | — | Low/No | CD8 β |
| | | | | | Binding | | | | Binding | |
| 35 | CD8B310 | — | — | — | Low/No | — | — | — | Low/No | CD8 β |
| | | | | | Binding | | | | Binding | |
| 36 | CD8B352 | — | — | — | Low/No | — | — | — | Low/No | CD8 β |
| | | | | | Binding | | | | Binding | |
| 37 | CD8B319 | — | — | — | Low/No | — | — | — | Low/No | CD8 β |
| | | | | | Binding | | | | Binding | |
| 38 | CD8B194 | — | — | — | Poor Fit, ~1 | — | — | — | Poor Fit, ~1 | CD8 α/β |
| | | | | | nM | | | | nM | interface |
| 39 | CD8B231 | — | — | — | Poor Fit, ~0.5 | — | — | — | Poor Fit, ~0.5 | CD8 α/β |
| | | | | | nM | | | | nM | interface |
| 40 | CD8B238 | — | — | — | Poor Fit, ~200 | — | — | — | Poor Fit, ~200 | CD8 α/β |
| | | | | | pM | | | | pM | interface |
| 41 | CD8B255 | — | — | — | Poor Fit, ~1 | — | — | — | Poor Fit, ~1 | CD8 α/β |
| | | | | | nM | | | | nM | interface |
| 42 | CD8B324 | — | — | — | Poor Fit, ~1 | — | — | — | Poor Fit, ~1 | CD8 α/β |
| | | | | | nM | | | | nM | interface |
| 43 | CD8B337 | — | — | — | Poor Fit, ~1 | — | — | — | Poor Fit, ~1 | CD8 α/β |
| | | | | | nM | | | | nM | interface |
| 44 | CD8B344 | — | — | — | Poor Fit, ~5 | — | — | — | Poor Fit, ~5 | CD8 α/β |
| | | | | | nM | | | | nM | interface |
| 45 | CD8B264 | — | — | — | Poor Fit, ~0.5 | — | — | — | Poor Fit, ~0.5 | CD8 α/β |
| | | | | | nM | | | | nM | interface |
| 46 | CD8B318 | — | — | — | Poor Fit, ~1 | — | — | — | Poor Fit, ~1 | CD8 α/β |
| | | | | | nM | | | | nM | interface |
| 47 | CD8B333 | — | — | — | Poor Fit, ~1 | — | — | — | Poor Fit, ~1 | CD8 α/β |
| | | | | | nM | | | | nM | interface |
| 48 | CD8B366 | — | — | — | Poor Fit, ~20 | — | — | — | Poor Fit, ~20 | CD8 α/β |
| | | | | | nM | | | | nM | interface |
| 49 | CD8B368 | — | — | — | Poor Fit, ~0.5 | — | — | — | Poor Fit, ~0.5 | CD8 α/β |
| | | | | | nM | | | | nM | interface |
| 50 | CD8B370 | — | — | — | Poor Fit, ~5 | — | — | — | Poor Fit, ~5 | CD8 α/β |
| | | | | | nM | | | | nM | interface |
| 51 | CD8B186 | — | — | — | Low/No | — | — | — | Low/No | — |
| | | | | | Binding | | | | Binding | |
| 52 | CD8B190 | — | — | — | Low/No | — | — | — | Low/No | — |
| | | | | | Binding | | | | Binding | |
| 53 | CD8B192 | — | — | — | Low/No | — | — | — | Low/No | — |
| | | | | | Binding | | | | Binding | |
| 54 | CD8B193 | — | — | — | Low/No | — | — | — | Low/No | — |
| | | | | | Binding | | | | Binding | |
| 55 | CD8B214 | — | — | — | Low/No | — | — | — | Low/No | — |
| | | | | | Binding | | | | Binding | |
| 56 | CD8B230 | — | — | — | Low/No | — | — | — | Low/No | — |
| | | | | | Binding | | | | Binding | |
| 57 | CD8B245 | — | — | — | Low/No | — | — | — | Low/No | — |
| | | | | | Binding | | | | Binding | |
| 58 | CD8B248 | — | — | — | Low/No | — | — | — | Low/No | — |
| | | | | | Binding | | | | Binding | |
| 59 | CD8B250 | — | — | — | Low/No | — | — | — | Low/No | — |
| | | | | | Binding | | | | Binding | |
| 60 | CD8B254 | — | — | — | Low/No | — | — | — | Low/No | — |
| | | | | | Binding | | | | Binding | |
| 61 | CD8B261 | — | — | — | Low/No | — | — | — | Low/No | — |
| | | | | | Binding | | | | Binding | |
| 62 | CD8B311 | — | — | — | Low/No | — | — | — | Low/No | — |
| | | | | | Binding | | | | Binding | |
| 63 | CD8B340 | — | — | — | Low/No | — | — | — | Low/No | — |
| | | | | | Binding | | | | Binding | |
| 64 | CD8B362 | — | — | — | Low/No | — | — | — | Low/No | — |
| | | | | | Binding | | | | Binding | |

[0696] It will be appreciated by those skilled in the art that changes could be made to the embodiments described above without departing from the broad inventive concept thereof. It is understood, therefore, that this invention is not limited to the particular embodiments disclosed, but it is intended to cover modifications within the spirit and scope of the present invention as defined by the present description.

The application's sequence listing, which the Patent Office published only in electronic form, follows.

SEQUENCE LISTING (2323 sequences)

SEQ ID NO: 1 - protein, 5 aa, Artificial Sequence
  Description of Artificial Sequence: Synthetic peptide
DYYMN

SEQ ID NO: 2 - protein, 17 aa, Artificial Sequence
  Description of Artificial Sequence: Synthetic peptide
RVIPSNGGTIYNLKFKG

SEQ ID NO: 3 - protein, 15 aa, Artificial Sequence
  Description of Artificial Sequence: Synthetic peptide
EDYNNQGFFLDAMDY

SEQ ID NO: 4 - protein, 11 aa, Artificial Sequence
  Description of Artificial Sequence: Synthetic peptide
RASQSISDFLH

SEQ ID NO: 5 - protein, 7 aa, Artificial Sequence
  Description of Artificial Sequence: Synthetic peptide
YASQSIS

SEQ ID NO: 6 - protein, 9 aa, Artificial Sequence
  Description of Artificial Sequence: Synthetic peptide
QNGHSFPYT

SEQ ID NO: 7 - protein, 7 aa, Artificial Sequence
  Description of Artificial Sequence: Synthetic peptide
GYTFTDY

SEQ ID NO: 8 - protein, 6 aa, Artificial Sequence
  Description of Artificial Sequence: Synthetic peptide
IPSNGG

SEQ ID NO: 9 - protein, 14 aa, Artificial Sequence
  Description of Artificial Sequence: Synthetic peptide
EDYNNQGFFLDAMD

SEQ ID NO: 10 - protein, 7 aa, Artificial Sequence
  Description of Artificial Sequence: Synthetic peptide
SQSISDF

SEQ ID NO: 11 - protein, 3 aa, Artificial Sequence
  Description of Artificial Sequence: Synthetic peptide
YAS

SEQ ID NO: 12 - protein, 6 aa, Artificial Sequence
  Description of Artificial Sequence: Synthetic peptide
GHSFPY

SEQ ID NO: 13 - protein, 10 aa, Artificial Sequence
  Description of Artificial Sequence: Synthetic peptide
GYTFTDYYMN

SEQ ID NO: 14 - protein, 10 aa, Artificial Sequence
  Description of Artificial Sequence: Synthetic peptide
RVIPSNGGTI

SEQ ID NO: 15 - protein, 15 aa, Artificial Sequence
  Description of Artificial Sequence: Synthetic peptide
EDYNNQGFFLDAMDY

SEQ ID NO: 16 - protein, 11 aa, Artificial Sequence
  Description of Artificial Sequence: Synthetic peptide
RASQSISDFLH

SEQ ID NO: 17 - protein, 7 aa, Artificial Sequence
  Description of Artificial Sequence: Synthetic peptide
YASQSIS

SEQ ID NO: 18 - protein, 9 aa, Artificial Sequence
  Description of Artificial Sequence: Synthetic peptide
QNGHSFPYT

SEQ ID NO: 19 - protein, 6 aa, Artificial Sequence
  Description of Artificial Sequence: Synthetic peptide
TDYYMN

SEQ ID NO: 20 - protein, 13 aa, Artificial Sequence
  Description of Artificial Sequence: Synthetic peptide
WIGRVIPSNGGTI

SEQ ID NO: 21 - protein, 16 aa, Artificial Sequence
  Description of Artificial Sequence: Synthetic peptide
AREDYNNQGFFLDAMD

SEQ ID NO: 22 - protein, 7 aa, Artificial Sequence
  Description of Artificial Sequence: Synthetic peptide
SDFLHWY

SEQ ID NO: 23 - protein, 10 aa, Artificial Sequence
  Description of Artificial Sequence: Synthetic peptide
LLIKYASQSI

SEQ ID NO: 24 - protein, 8 aa, Artificial Sequence
  Description of Artificial Sequence: Synthetic peptide
QNGHSFPY

SEQ ID NO: 25 - protein, 8 aa, Artificial Sequence
  Description of Artificial Sequence: Synthetic peptide
GYTFTDYY

SEQ ID NO: 26 - protein, 8 aa, Artificial Sequence
  Description of Artificial Sequence: Synthetic peptide
VIPSNGGT

SEQ ID NO: 27 - protein, 17 aa, Artificial Sequence
  Description of Artificial Sequence: Synthetic peptide
AREDYNNQGFFLDAMDY

SEQ ID NO: 28 - protein, 6 aa, Artificial Sequence
  Description of Artificial Sequence: Synthetic peptide
QSISDF

SEQ ID NO: 29 - protein, 3 aa, Artificial Sequence
  Description of Artificial Sequence: Synthetic peptide
YAS

SEQ ID NO: 30 - protein, 9 aa, Artificial Sequence
  Description of Artificial Sequence: Synthetic peptide
QNGHSFPYT

SEQ ID NO: 31 - protein, 124 aa, Artificial Sequence
  Description of Artificial Sequence: Synthetic polypeptide
QIQLVQSGPELVKPGTSMKMSCKASGYTFTDYYMNWVKQSHGKSLEWIGRVIPSNGGTIYNLKFKGKATLTVDKSLSTAYMQLNSLTSEDSAVYFCAREDYNNQGFFLDAMDYWGQGTSVTVSS

SEQ ID NO: 32 - protein, 107 aa, Artificial Sequence
  Description of Artificial Sequence: Synthetic polypeptide
DIVLTQSPATLSVTPGDRVSLSCRASQSISDFLHWYQQKSHESPRLLIKYASQSISGIPSRFSGSGSGSDFTLTINSVEPEDVGVYYCQNGHSFPYTFGSGTKLEIK

SEQ ID NO: 33 - protein, 454 aa, Artificial Sequence
  Description of Artificial Sequence: Synthetic polypeptide
QIQLVQSGPELVKPGTSMKMSCKASGYTFTDYYMNWVKQSHGKSLEWIGRVIPSNGGTIYNLKFKGKATLTVDKSLSTAYMQLNSLTSEDSAVYFCAREDYNNQGFFLDAMDYWGQGTSVTVSSASTKGPSVFPLAPSSKSTSGGTAALGCLVKDYFPEPVTVSWNSGALTSGVHTFPAVLQSSGLYSLSSVVTVPSSSLGTQTYICNVNHKPSNTKVDKKVEPKSCDKTHTCPPCPAPELLGGPSVFLFPPKPKDTLMISRTPEVTCVVVDVSHEDPEVKFNWYVDGVEVHNAKTKPREEQYNSTYRVVSVLTVLHQDWLNGKEYKCKVSNKALPAPIEKTISKAKGQPREPQVYTLPPSREEMTKNQVSLTCLVKGFYPSDIAVEWESNGQPENNYKTTPPVLDSDGSFFLYSKLTVDKSRWQQGNVFSCSVMHEALHNHYTQKSLSLSPGK

SEQ ID NO: 34 - protein, 214 aa, Artificial Sequence
  Description of Artificial Sequence: Synthetic polypeptide
DIVLTQSPATLSVTPGDRVSLSCRASQSISDFLHWYQQKSHESPRLLIKYASQSISGIPSRFSGSGSGSDFTLTINSVEPEDVGVYYCQNGHSFPYTFGSGTKLEIKRTVAAPSVFIFPPSDEQLKSGTASVVCLLNNFYPREAKVQWKVDNALQSGNSQESVTEQDSKDSTYSLSSTLTLSKADYEKHKVYACEVTHQGLSSPVTKSFNRGEC

SEQ ID NO: 35 - protein, 5 aa, Artificial Sequence
  Description of Artificial Sequence: Synthetic peptide
DYYMN

SEQ ID NO: 36 - protein, 17 aa, Artificial Sequence
  Description of Artificial Sequence: Synthetic peptide
RIIPSNGATIYNQKFKG

SEQ ID NO: 37 - protein, 15 aa, Artificial Sequence
  Description of Artificial Sequence: Synthetic peptide
EDYSNQGFFLDAMDY

SEQ ID NO: 38 - protein, 11 aa, Artificial Sequence
  Description of Artificial Sequence: Synthetic peptide
RASQSISHYLH

SEQ ID NO: 39 - protein, 7 aa, Artificial Sequence
  Description of Artificial Sequence: Synthetic peptide
YASQSIS

SEQ ID NO: 40 - protein, 9 aa, Artificial Sequence
  Description of Artificial Sequence: Synthetic peptide
QNGHSFPYT

SEQ ID NO: 41 - protein, 7 aa, Artificial Sequence
  Description of Artificial Sequence: Synthetic peptide
GYTFTDY

SEQ ID NO: 42 - protein, 6 aa, Artificial Sequence
  Description of Artificial Sequence: Synthetic peptide
IPSNGA

SEQ ID NO: 43 - protein, 14 aa, Artificial Sequence
  Description of Artificial Sequence: Synthetic peptide
EDYSNQGFFLDAMD

SEQ ID NO: 44 - protein, 7 aa, Artificial Sequence
  Description of Artificial Sequence: Synthetic peptide
SQSISHY

SEQ ID NO: 45 - protein, 3 aa, Artificial Sequence
  Description of Artificial Sequence: Synthetic peptide
YAS

SEQ ID NO: 46 - protein, 6 aa, Artificial Sequence
  Description of Artificial Sequence: Synthetic peptide
GHSFPY

SEQ ID NO: 47 - protein, 10 aa, Artificial Sequence
  Description of Artificial Sequence: Synthetic peptide
GYTFTDYYMN

SEQ ID NO: 48 - protein, 10 aa, Artificial Sequence
  Description of Artificial Sequence: Synthetic peptide
RIIPSNGATI

SEQ ID NO: 49 - protein, 15 aa, Artificial Sequence
  Description of Artificial Sequence: Synthetic peptide
EDYSNQGFFLDAMDY

SEQ ID NO: 50 - protein, 11 aa, Artificial Sequence
  Description of Artificial Sequence: Synthetic peptide
RASQSISHYLH

SEQ ID NO: 51 - protein, 7 aa, Artificial Sequence
  Description of Artificial Sequence: Synthetic peptide
YASQSIS

SEQ ID NO: 52 - protein, 9 aa, Artificial Sequence
  Description of Artificial Sequence: Synthetic peptide
QNGHSFPYT

SEQ ID NO: 53 - protein, 6 aa, Artificial Sequence
  Description of Artificial Sequence: Synthetic peptide
TDYYMN

SEQ ID NO: 54 - protein, 13 aa, Artificial Sequence
  Description of Artificial Sequence: Synthetic peptide
WIGRIIPSNGATI

SEQ ID NO: 55 - protein, 16 aa, Artificial Sequence
  Description of Artificial Sequence: Synthetic peptide
AREDYSNQGFFLDAMD

SEQ ID NO: 56 - protein, 7 aa, Artificial Sequence
  Description of Artificial Sequence: Synthetic peptide
SHYLHWY

SEQ ID NO: 57 - protein, 10 aa, Artificial Sequence
  Description of Artificial Sequence: Synthetic peptide
LLIKYASQSI

SEQ ID NO: 58 - protein, 8 aa, Artificial Sequence
  Description of Artificial Sequence: Synthetic peptide
QNGHSFPY

SEQ ID NO: 59 - protein, 8 aa, Artificial Sequence
  Description of Artificial Sequence: Synthetic peptide
GYTFTDYY

SEQ ID NO: 60 - protein, 8 aa, Artificial Sequence
  Description of Artificial Sequence: Synthetic peptide
IIPSNGAT

SEQ ID NO: 61 - protein, 17 aa, Artificial Sequence
  Description of Artificial Sequence: Synthetic peptide
AREDYSNQGFFLDAMDY

SEQ ID NO: 62 - protein, 6 aa, Artificial Sequence
  Description of Artificial Sequence: Synthetic peptide
QSISHY

SEQ ID NO: 63 - protein, 3 aa, Artificial Sequence
  Description of Artificial Sequence: Synthetic peptide
YAS

SEQ ID NO: 64 - protein, 9 aa, Artificial Sequence
  Description of Artificial Sequence: Synthetic peptide
QNGHSFPYT

SEQ ID NO: 65 - protein, 124 aa, Artificial Sequence
  Description of Artificial Sequence: Synthetic polypeptide
EFQLQQSGPELVKPGASVKMSCKASGYTFTDYYMNWVKQSHGKSLQWIGRIIPSNGATIYNQKFKGKATLTVDKSLSTAYMHLNSLTSEDSAVYYCAREDYSNQGFFLDAMDYWGQGTTVTVSS

SEQ ID NO: 66 - protein, 107 aa, Artificial Sequence
  Description of Artificial Sequence: Synthetic polypeptide
DIVMTQSPATLSVTPGDRVSLSCRASQSISHYLHWYQQKLHESPRLLIKYASQSISGIPSRFSGSGSGSDFTLSINSVEPEDVGVYYCQNGHSFPYTFGGGTKLEIK

SEQ ID NO: 67 - protein, 454 aa, Artificial Sequence
  Description of Artificial Sequence: Synthetic polypeptide
EFQLQQSGPELVKPGASVKMSCKASGYTFTDYYMNWVKQSHGKSLQWIGRIIPSNGATIYNQKFKGKATLTVDKSLSTAYMHLNSLTSEDSAVYYCAREDYSNQGFFLDAMDYWGQGTTVTVSSASTKGPSVFPLAPSSKSTSGGTAALGCLVKDYFPEPVTVSWNSGALTSGVHTFPAVLQSSGLYSLSSVVTVPSSSLGTQTYICNVNHKPSNTKVDKKVEPKSCDKTHTCPPCPAPELLGGPSVFLFPPKPKDTLMISRTPEVTCVVVDVSHEDPEVKFNWYVDGVEVHNAKTKPREEQYNSTYRVVSVLTVLHQDWLNGKEYKCKVSNKALPAPIEKTISKAKGQPREPQVYTLPPSREEMTKNQVSLTCLVKGFYPSDIAVEWESNGQPENNYKTTPPVLDSDGSFFLYSKLTVDKSRWQQGNVFSCSVMHEALHNHYTQKSLSLSPGK

SEQ ID NO: 68 - protein, 214 aa, Artificial Sequence
  Description of Artificial Sequence: Synthetic polypeptide
DIVMTQSPATLSVTPGDRVSLSCRASQSISHYLHWYQQKLHESPRLLIKYASQSISGIPSRFSGSGSGSDFTLSINSVEPEDVGVYYCQNGHSFPYTFGGGTKLEIKRTVAAPSVFIFPPSDEQLKSGTASVVCLLNNFYPREAKVQWKVDNALQSGNSQESVTEQDSKDSTYSLSSTLTLSKADYEKHKVYACEVTHQGLSSPVTKSFNRGEC

SEQ ID NO: 69 - protein, 5 aa, Artificial Sequence
  Description of Artificial Sequence: Synthetic peptide
DYYMN

SEQ ID NO: 70 - protein, 17 aa, Artificial Sequence
  Description of Artificial Sequence: Synthetic peptide
RVIPSNGGTIYNQKFRG

SEQ ID NO: 71 - protein, 15 aa, Artificial Sequence
  Description of Artificial Sequence: Synthetic peptide
EDYGNQGFFLDAMDY

SEQ ID NO: 72 - protein, 11 aa, Artificial Sequence
  Description of Artificial Sequence: Synthetic peptide
RASQSISHFLH

SEQ ID NO: 73 - protein, 7 aa, Artificial Sequence
  Description of Artificial Sequence: Synthetic peptide
YASQSIS

SEQ ID NO: 74 - protein, 9 aa, Artificial Sequence
  Description of Artificial Sequence: Synthetic peptide
QSGHSFPYT

SEQ ID NO: 75 - protein, 7 aa, Artificial Sequence
  Description of Artificial Sequence: Synthetic peptide
GYTFTDY

SEQ ID NO: 76 - protein, 6 aa, Artificial Sequence
  Description of Artificial Sequence: Synthetic peptide
IPSNGG

SEQ ID NO: 77 - protein, 14 aa, Artificial Sequence
  Description of Artificial Sequence: Synthetic peptide
EDYGNQGFFLDAMD

SEQ ID NO: 78 - protein, 7 aa, Artificial Sequence
  Description of Artificial Sequence: Synthetic peptide
SQSISHF

SEQ ID NO: 79 - protein, 3 aa, Artificial Sequence
  Description of Artificial Sequence: Synthetic peptide
YAS

SEQ ID NO: 80 - protein, 6 aa, Artificial Sequence
  Description of Artificial Sequence: Synthetic peptide
GHSFPY

SEQ ID NO: 81 - protein, 10 aa, Artificial Sequence
  Description of Artificial Sequence: Synthetic peptide
GYTFTDYYMN

SEQ ID NO: 82 - protein, 10 aa, Artificial Sequence
  Description of Artificial Sequence: Synthetic peptide
RVIPSNGGTI

SEQ ID NO: 83 - protein, 15 aa, Artificial Sequence
  Description of Artificial Sequence: Synthetic peptide
EDYGNQGFFLDAMDY

SEQ ID NO: 84 - protein, 11 aa, Artificial Sequence
  Description of Artificial Sequence: Synthetic peptide
RASQSISHFLH

SEQ ID NO: 85 - protein, 7 aa, Artificial Sequence
  Description of Artificial Sequence: Synthetic peptide
YASQSIS

SEQ ID NO: 86 - protein, 9 aa, Artificial Sequence
  Description of Artificial Sequence: Synthetic peptide
QSGHSFPYT

SEQ ID NO: 87 - protein, 6 aa, Artificial Sequence
  Description of Artificial Sequence: Synthetic peptide
TDYYMN

SEQ ID NO: 88 - protein, 13 aa, Artificial Sequence
  Description of Artificial Sequence: Synthetic peptide
WIGRVIPSNGGTI

SEQ ID NO: 89 - protein, 16 aa, Artificial Sequence
  Description of Artificial Sequence: Synthetic peptide
AREDYGNQGFFLDAMD

SEQ ID NO: 90 - protein, 7 aa, Artificial Sequence
  Description of Artificial Sequence: Synthetic peptide
SHFLHWY

SEQ ID NO: 91 - protein, 10 aa, Artificial Sequence
  Description of Artificial Sequence: Synthetic peptide
LLIKYASQSI

SEQ ID NO: 92 - protein, 8 aa, Artificial Sequence
  Description of Artificial Sequence: Synthetic peptide
QSGHSFPY

SEQ ID NO: 93 - protein, 8 aa, Artificial Sequence
  Description of Artificial Sequence: Synthetic peptide
GYTFTDYY

SEQ ID NO: 94 - protein, 8 aa, Artificial Sequence
  Description of Artificial Sequence: Synthetic peptide
VIPSNGGT

SEQ ID NO: 95 - protein, 17 aa, Artificial Sequence
  Description of Artificial Sequence: Synthetic peptide
AREDYGNQGFFLDAMDY

SEQ ID NO: 96 - protein, 6 aa, Artificial Sequence
  Description of Artificial Sequence: Synthetic peptide
QSISHF

SEQ ID NO: 97 - protein, 3 aa, Artificial Sequence
  Description of Artificial Sequence: Synthetic peptide
YAS

SEQ ID NO: 98 - protein, 9 aa, Artificial Sequence
  Description of Artificial Sequence: Synthetic peptide
QSGHSFPYT

SEQ ID NO: 99 - protein, 124 aa, Artificial Sequence
  Description of Artificial Sequence: Synthetic polypeptide
EVQLQQSGPELVKPGASVKMSCKASGYTFTDYYMNWVKQSHGKSLEWIGRVIPSNGGTIYNQKFRGKATLTVDKSLSTAYMQLNSLTSEDSAVYYCAREDYGNQGFFLDAMDYWGQGTTVTVSS

SEQ ID NO: 100 - protein, 107 aa, Artificial Sequence
  Description of Artificial Sequence: Synthetic polypeptide
DIVMTQSPATLSVTPGDRVSLSCRASQSISHFLHWYQQKSHESPRLLIKYASQSISGSPSKFSGSGSGSDFTLTINSVEPEDVGVYYCQSGHSFPYTFGSGTKLEIK

SEQ ID NO: 101 - protein, 454 aa, Artificial Sequence
  Description of Artificial Sequence: Synthetic polypeptide
EVQLQQSGPELVKPGASVKMSCKASGYTFTDYYMNWVKQSHGKSLEWIGRVIPSNGGTIYNQKFRGKATLTVDKSLSTAYMQLNSLTSEDSAVYYCAREDYGNQGFFLDAMDYWGQGTTVTVSSASTKGPSVFPLAPSSKSTSGGTAALGCLVKDYFPEPVTVSWNSGALTSGVHTFPAVLQSSGLYSLSSVVTVPSSSLGTQTYICNVNHKPSNTKVDKKVEPKSCDKTHTCPPCPAPELLGGPSVFLFPPKPKDTLMISRTPEVTCVVVDVSHEDPEVKFNWYVDGVEVHNAKTKPREEQYNSTYRVVSVLTVLHQDWLNGKEYKCKVSNKALPAPIEKTISKAKGQPREPQVYTLPPSREEMTKNQVSLTCLVKGFYPSDIAVEWESNGQPENNYKTTPPVLDSDGSFFLYSKLTVDKSRWQQGNVFSCSVMHEALHNHYTQKSLSLSPGK

SEQ ID NO: 102 - protein, 214 aa, Artificial Sequence
  Description of Artificial Sequence: Synthetic polypeptide
DIVMTQSPATLSVTPGDRVSLSCRASQSISHFLHWYQQKSHESPRLLIKYASQSISGSPSKFSGSGSGSDFTLTINSVEPEDVGVYYCQSGHSFPYTFGSGTKLEIKRTVAAPSVFIFPPSDEQLKSGTASVVCLLNNFYPREAKVQWKVDNALQSGNSQESVTEQDSKDSTYSLSSTLTLSKADYEKHKVYACEVTHQGLSSPVTKSFNRGEC

SEQ ID NO: 103 - protein, 5 aa, Artificial Sequence
  Description of Artificial Sequence: Synthetic peptide
DYYMN

SEQ ID NO: 104 - protein, 17 aa, Artificial Sequence
  Description of Artificial Sequence: Synthetic peptide
RVIPNNGGTRYNQKFKG

SEQ ID NO: 105 - protein, 15 aa, Artificial Sequence
  Description of Artificial Sequence: Synthetic peptide
EDFSNQGFFLDAMDY

SEQ ID NO: 106 - protein, 11 aa, Artificial Sequence
  Description of Artificial Sequence: Synthetic peptide
RASQTISDYLH

SEQ ID NO: 107 - protein, 7 aa, Artificial Sequence
  Description of Artificial Sequence: Synthetic peptide
YASQSIS

SEQ ID NO: 108 - protein, 9 aa, Artificial Sequence
  Description of Artificial Sequence: Synthetic peptide
QNGHSFPYT

SEQ ID NO: 109 - protein, 7 aa, Artificial Sequence
  Description of Artificial Sequence: Synthetic peptide
GYTFTDY

SEQ ID NO: 110 - protein, 6 aa, Artificial Sequence
  Description of Artificial Sequence: Synthetic peptide
IPNNGG

SEQ ID NO: 111 - protein, 14 aa, Artificial Sequence
  Description of Artificial Sequence: Synthetic peptide
EDFSNQGFFLDAMD

SEQ ID NO: 112 - protein, 7 aa, Artificial Sequence
  Description of Artificial Sequence: Synthetic peptide
SQTISDY

SEQ ID NO: 113 - protein, 3 aa, Artificial Sequence
  Description of Artificial Sequence: Synthetic peptide
YAS

SEQ ID NO: 114 - protein, 6 aa, Artificial Sequence
  Description of Artificial Sequence: Synthetic peptide
GHSFPY

SEQ ID NO: 115 - protein, 10 aa, Artificial Sequence
  Description of Artificial Sequence: Synthetic peptide
GYTFTDYYMN

SEQ ID NO: 116 - protein, 10 aa, Artificial Sequence
  Description of Artificial Sequence: Synthetic peptide
RVIPNNGGTR

SEQ ID NO: 117 - protein, 15 aa, Artificial Sequence
  Description of Artificial Sequence: Synthetic peptide
EDFSNQGFFLDAMDY

SEQ ID NO: 118 - protein, 11 aa, Artificial Sequence
  Description of Artificial Sequence: Synthetic peptide
RASQTISDYLH

SEQ ID NO: 119 - protein, 7 aa, Artificial Sequence
  Description of Artificial Sequence: Synthetic peptide
YASQSIS

SEQ ID NO: 120 - protein, 9 aa, Artificial Sequence
  Description of Artificial Sequence: Synthetic peptide
QNGHSFPYT

SEQ ID NO: 121 - protein, 6 aa, Artificial Sequence
  Description of Artificial Sequence: Synthetic peptide
TDYYMN

SEQ ID NO: 122 - protein, 13 aa, Artificial Sequence
  Description of Artificial Sequence: Synthetic peptide
WIGRVIPNNGGTR

SEQ ID NO: 123 - protein, 16 aa, Artificial Sequence
  Description of Artificial Sequence: Synthetic peptide
AREDFSNQGFFLDAMD

SEQ ID NO: 124 - protein, 7 aa, Artificial Sequence
  Description of Artificial Sequence: Synthetic peptide
SDYLHWY

SEQ ID NO: 125 - protein, 10 aa, Artificial Sequence
  Description of Artificial Sequence: Synthetic peptide
LLIKYASQSI

SEQ ID NO: 126 - protein, 8 aa, Artificial Sequence
  Description of Artificial Sequence: Synthetic peptide
QNGHSFPY

SEQ ID NO: 127 - protein, 8 aa, Artificial Sequence
  Description of Artificial Sequence: Synthetic peptide
GYTFTDYY

SEQ ID NO: 128 - protein, 8 aa, Artificial Sequence
  Description of Artificial Sequence: Synthetic peptide
VIPNNGGT

SEQ ID NO: 129 - protein, 17 aa, Artificial Sequence
  Description of Artificial Sequence: Synthetic peptide
AREDFSNQGFFLDAMDY

SEQ ID NO: 130 - protein, 6 aa, Artificial Sequence
  Description of Artificial Sequence: Synthetic peptide
QTISDY

SEQ ID NO: 131 - protein, 3 aa, Artificial Sequence
  Description of Artificial Sequence: Synthetic peptide
YAS

SEQ ID NO: 132 - protein, 9 aa, Artificial Sequence
  Description of Artificial Sequence: Synthetic peptide
QNGHSFPYT

SEQ ID NO: 133 - protein, 124 aa, Artificial Sequence
  Description of Artificial Sequence: Synthetic polypeptide
QVQLQQSGPELVKPGASVKMSCKASGYTFTDYYMNWVKQSHGKSLEWIGRVIPNNGGTRYNQKFKGKATLTVDKSLSTAYMQLNSLTSEDSAVYYCAREDFSNQGFFLDAMDYWGQGTSVTVSS

SEQ ID NO: 134 - protein, 107 aa, Artificial Sequence
  Description of Artificial Sequence: Synthetic polypeptide
DIVMTQSPATLSVTPGDRVSLSCRASQTISDYLHWYQQKSHESPRLLIKYASQSISGIPSRFSGSGSGSDFTLSINSVEPEDVGVYYCQNGHSFPYTFGAGTKLELK

SEQ ID NO: 135 - protein, 454 aa, Artificial Sequence
  Description of Artificial Sequence: Synthetic polypeptide
QVQLQQSGPELVKPGASVKMSCKASGYTFTDYYMNWVKQSHGKSLEWIGRVIPNNGGTRYNQKFKGKATLTVDKSLSTAYMQLNSLTSEDSAVYYCAREDFSNQGFFLDAMDYWGQGTSVTVSSASTKGPSVFPLAPSSKSTSGGTAALGCLVKDYFPEPVTVSWNSGALTSGVHTFPAVLQSSGLYSLSSVVTVPSSSLGTQTYICNVNHKPSNTKVDKKVEPKSCDKTHTCPPCPAPELLGGPSVFLFPPKPKDTLMISRTPEVTCVVVDVSHEDPEVKFNWYVDGVEVHNAKTKPREEQYNSTYRVVSVLTVLHQDWLNGKEYKCKVSNKALPAPIEKTISKAKGQPREPQVYTLPPSREEMTKNQVSLTCLVKGFYPSDIAVEWESNGQPENNYKTTPPVLDSDGSFFLYSKLTVDKSRWQQGNVFSCSVMHEALHNHYTQKSLSLSPGK

SEQ ID NO: 136 - protein, 214 aa, Artificial Sequence
  Description of Artificial Sequence: Synthetic polypeptide
DIVMTQSPATLSVTPGDRVSLSCRASQTISDYLHWYQQKSHESPRLLIKYASQSISGIPSRFSGSGSGSDFTLSINSVEPEDVGVYYCQNGHSFPYTFGAGTKLELKRTVAAPSVFIFPPSDEQLKSGTASVVCLLNNFYPREAKVQWKVDNALQSGNSQESVTEQDSKDSTYSLSSTLTLSKADYEKHKVYACEVTHQGLSSPVTKSFNRGEC

SEQ ID NO: 137 - protein, 5 aa, Artificial Sequence
  Description of Artificial Sequence: Synthetic peptide
DYYVN

SEQ ID NO: 138 - protein, 17 aa, Artificial Sequence
  Description of Artificial Sequence: Synthetic peptide
RVIPNNGNVIYNQNFKG

SEQ ID NO: 139 - protein, 15 aa, Artificial Sequence
  Description of Artificial Sequence: Synthetic peptide
EDYSNQGFFLDAMDY

SEQ ID NO: 140 - protein, 11 aa, Artificial Sequence
  Description of Artificial Sequence: Synthetic peptide
RASQTISNYLH

SEQ ID NO: 141 - protein, 7 aa, Artificial Sequence
  Description of Artificial Sequence: Synthetic peptide
YASQSIS

SEQ ID NO: 142 - protein, 9 aa, Artificial Sequence
  Description of Artificial Sequence: Synthetic peptide
QNGHSFPYT

SEQ ID NO: 143 - protein, 7 aa, Artificial Sequence
  Description of Artificial Sequence: Synthetic peptide
GYTFTDY

SEQ ID NO: 144 - protein, 6 aa, Artificial Sequence
  Description of Artificial Sequence: Synthetic peptide
IPNNGN

SEQ ID NO: 145 - protein, 14 aa, Artificial Sequence
  Description of Artificial Sequence: Synthetic peptide
EDYSNQGFFLDAMD

SEQ ID NO: 146 - protein, 7 aa, Artificial Sequence
  Description of Artificial Sequence: Synthetic peptide
SQTISNY

SEQ ID NO: 147 - protein, 3 aa, Artificial Sequence
  Description of Artificial Sequence: Synthetic peptide
YAS

SEQ ID NO: 148 - protein, 6 aa, Artificial Sequence
  Description of Artificial Sequence: Synthetic peptide
GHSFPY

SEQ ID NO: 149 - protein, 10 aa, Artificial Sequence
  Description of Artificial Sequence: Synthetic peptide
GYTFTDYYVN

SEQ ID NO: 150 - protein, 10 aa, Artificial Sequence
  Description of Artificial Sequence: Synthetic peptide
RVIPNNGNVI

SEQ ID NO: 151 - protein, 15 aa, Artificial Sequence
  Description of Artificial Sequence: Synthetic peptide
EDYSNQGFFLDAMDY

SEQ ID NO: 152 - protein, 11 aa, Artificial Sequence
  Description of Artificial Sequence: Synthetic peptide
RASQTISNYLH

SEQ ID NO: 153 - protein, 7 aa, Artificial Sequence
  Description of Artificial Sequence: Synthetic peptide
YASQSIS

SEQ ID NO: 154 - protein, 9 aa, Artificial Sequence
  Description of Artificial Sequence: Synthetic peptide
QNGHSFPYT

SEQ ID NO: 155 - protein, 6 aa, Artificial Sequence
  Description of Artificial Sequence: Synthetic peptide
TDYYVN

SEQ ID NO: 156 - protein, 13 aa, Artificial Sequence
  Description of Artificial Sequence: Synthetic peptide
WIGRVIPNNGNVI

SEQ ID NO: 157 - protein, 16 aa, Artificial Sequence
  Description of Artificial Sequence: Synthetic peptide
TREDYSNQGFFLDAMD

SEQ ID NO: 158 - protein, 7 aa, Artificial Sequence
  Description of Artificial Sequence: Synthetic peptide
SNYLHWY

SEQ ID NO: 159 - protein, 10 aa, Artificial Sequence
  Description of Artificial Sequence: Synthetic peptide
LLIKYASQSI

SEQ ID NO: 160 - protein, 8 aa, Artificial Sequence
  Description of Artificial Sequence: Synthetic peptide
QNGHSFPY

SEQ ID NO: 161 - protein, 8 aa, Artificial Sequence
  Description of Artificial Sequence: Synthetic peptide
GYTFTDYY

SEQ ID NO: 162 - protein, 8 aa, Artificial Sequence
  Description of Artificial Sequence: Synthetic peptide
VIPNNGNV

SEQ ID NO: 163 - protein, 17 aa, Artificial Sequence
  Description of Artificial Sequence: Synthetic peptide
TREDYSNQGFFLDAMDY

SEQ ID NO: 164 - protein, 6 aa, Artificial Sequence
  Description of Artificial Sequence: Synthetic peptide
QTISNY

SEQ ID NO: 165 - protein, 3 aa, Artificial Sequence
  Description of Artificial Sequence: Synthetic peptide
YAS

SEQ ID NO: 166 - protein, 9 aa, Artificial Sequence
  Description of Artificial Sequence: Synthetic peptide
QNGHSFPYT

SEQ ID NO: 167 - protein, 124 aa, Artificial Sequence
  Description of Artificial Sequence: Synthetic polypeptide
EFQLQQSGPELVKPGASVKVSCKASGYTFTDYYVNWVQQSHGKSLEWIGRVIPNNGNVIYNQNFKGKATLTVDKSLSSAYLQLNSLTSEDSAVYYCTREDYSNQGFFLDAMDYWGQGTSVTVSS

SEQ ID NO: 168 - protein, 107 aa, Artificial Sequence
  Description of Artificial Sequence: Synthetic polypeptide
DIVMTQTPATLSVTPGDRVSLSCRASQTISNYLHWYQQKSHESPRLLIKYASQSISGIPSRFSGSGSGSDFTLSINSVEPEDVGVYYCQNGHSFPYTFGGGTKLEIK

SEQ ID NO: 169 - protein, 454 aa, Artificial Sequence
  Description of Artificial Sequence: Synthetic polypeptide
EFQLQQSGPELVKPGASVKVSCKASGYTFTDYYVNWVQQSHGKSLEWIGRVIPNNGNVIYNQNFKGKATLTVDKSLSSAYLQLNSLTSEDSAVYYCTREDYSNQGFFLDAMDYWGQGTSVTVSSASTKGPSVFPLAPSSKSTSGGTAALGCLVKDYFPEPVTVSWNSGALTSGVHTFPAVLQSSGLYSLSSVVTVPSSSLGTQTYICNVNHKPSNTKVDKKVEPKSCDKTHTCPPCPAPELLGGPSVFLFPPKPKDTLMISRTPEVTCVVVDVSHEDPEVKFNWYVDGVEVHNAKTKPREEQYNSTYRVVSVLTVLHQDWLNGKEYKCKVSNKALPAPIEKTISKAKGQPREPQVYTLPPSREEMTKNQVSLTCLVKGFYPSDIAVEWESNGQPENNYKTTPPVLDSDGSFFLYSKLTVDKSRWQQGNVFSCSVMHEALHNHYTQKSLSLSPGK

SEQ ID NO: 170 - protein, 214 aa, Artificial Sequence
  Description of Artificial Sequence: Synthetic polypeptide
DIVMTQTPATLSVTPGDRVSLSCRASQTISNYLHWYQQKSHESPRLLIKYASQSISGIPSRFSGSGSGSDFTLSINSVEPEDVGVYYCQNGHSFPYTFGGGTKLEIKRTVAAPSVFIFPPSDEQLKSGTASVVCLLNNFYPREAKVQWKVDNALQSGNSQESVTEQDSKDSTYSLSSTLTLSKADYEKHKVYACEVTHQGLSSPVTKSFNRGEC

SEQ ID NO: 171 - protein, 5 aa, Artificial Sequence
  Description of Artificial Sequence: Synthetic peptide
SYWMH

SEQ ID NO: 172 - protein, 17 aa, Artificial Sequence
  Description of Artificial Sequence: Synthetic peptide
EINPSNGDSYYNEKFKR

SEQ ID NO: 173 - protein, 11 aa, Artificial Sequence
  Description of Artificial Sequence: Synthetic peptide
SMYYDGRAGAY

SEQ ID NO: 174 - protein, 11 aa, Artificial Sequence
  Description of Artificial Sequence: Synthetic peptide
ITSTDIDDDMN

SEQ ID NO: 175 - protein, 7 aa, Artificial Sequence
  Description of Artificial Sequence: Synthetic peptide
EGNTLRP

SEQ ID NO: 176 - protein, 9 aa, Artificial Sequence
  Description of Artificial Sequence: Synthetic peptide
LQSDNMPLT

SEQ ID NO: 177 - protein, 7 aa, Artificial Sequence
  Description of Artificial Sequence: Synthetic peptide
GYTFTSY

SEQ ID NO: 178 - protein, 6 aa, Artificial Sequence
  Description of Artificial Sequence: Synthetic peptide
NPSNGD

SEQ ID NO: 179 - protein, 10 aa, Artificial Sequence
  Description of Artificial Sequence: Synthetic peptide
SMYYDGRAGA

SEQ ID NO: 180 - protein, 7 aa, Artificial Sequence
  Description of Artificial Sequence: Synthetic peptide
STDIDDD

SEQ ID NO: 181 - protein, 3 aa, Artificial Sequence
  Description of Artificial Sequence: Synthetic peptide
EGN

SEQ ID NO: 182 - protein, 6 aa, Artificial Sequence
  Description of Artificial Sequence: Synthetic peptide
SDNMPL

SEQ ID NO: 183 - protein, 10 aa, Artificial Sequence
  Description of Artificial Sequence: Synthetic peptide
GYTFTSYWMH

SEQ ID NO: 184 - protein, 10 aa, Artificial Sequence
  Description of Artificial Sequence: Synthetic peptide
EINPSNGDSY

SEQ ID NO: 185 - protein, 11 aa, Artificial Sequence
  Description of Artificial Sequence: Synthetic peptide
SMYYDGRAGAY

SEQ ID NO: 186 - protein, 11 aa, Artificial Sequence
  Description of Artificial Sequence: Synthetic peptide
ITSTDIDDDMN

SEQ ID NO: 187 - protein, 7 aa, Artificial Sequence
  Description of Artificial Sequence: Synthetic peptide
EGNTLRP

SEQ ID NO: 188 - protein, 9 aa, Artificial Sequence
  Description of Artificial Sequence: Synthetic peptide
LQSDNMPLT

SEQ ID NO: 189 - protein, 6 aa, Artificial Sequence
  Description of Artificial Sequence: Synthetic peptide
TSYWMH

SEQ ID NO: 190 - protein, 13 aa, Artificial Sequence
  Description of Artificial Sequence: Synthetic peptide
WIGEINPSNGDSY

SEQ ID NO: 191 - protein, 12 aa, Artificial Sequence
  Description of Artificial Sequence: Synthetic peptide
TRSMYYDGRAGA

SEQ ID NO: 192 - protein, 7 aa, Artificial Sequence
  Description of Artificial Sequence: Synthetic peptide
DDDMNWY

SEQ ID NO: 193 - protein, 10 aa, Artificial Sequence
  Description of Artificial Sequence: Synthetic peptide
LLISEGNTLR

SEQ ID NO: 194 - protein, 8 aa, Artificial Sequence
  Description of Artificial Sequence: Synthetic peptide
LQSDNMPL

SEQ ID NO: 195 - protein, 8 aa, Artificial Sequence
  Description of Artificial Sequence: Synthetic peptide
GYTFTSYW

SEQ ID NO: 196 - protein, 8 aa, Artificial Sequence
  Description of Artificial Sequence: Synthetic peptide
INPSNGDS

SEQ ID NO: 197 - protein, 13 aa, Artificial Sequence
  Description of Artificial Sequence: Synthetic peptide
TRSMYYDGRAGAY

SEQ ID NO: 198 - protein, 6 aa, Artificial Sequence
  Description of Artificial Sequence: Synthetic peptide
TDIDDD

SEQ ID NO: 199 - protein, 3 aa, Artificial Sequence
  Description of Artificial Sequence: Synthetic peptide
EGN

SEQ ID NO: 200 - protein, 9 aa, Artificial Sequence
  Description of Artificial Sequence: Synthetic peptide
LQSDNMPLT

SEQ ID NO: 201 - protein, 120 aa, Artificial Sequence
  Description of Artificial Sequence: Synthetic polypeptide
QVQLQQPGAELVKPGASVKLSCKASGYTFTSYWMHWVNRRPGQGLEWIGEINPSNGDSYYNEKFKRKATLTVDISSSTAYMQLSSLTSEDSAVYYCTRSMYYDGRAGAYWGQGTTVTVSS

SEQ ID NO: 202 - protein, 107 aa, Artificial Sequence
  Description of Artificial Sequence: Synthetic polypeptide
DIVLTQSPASLSVATGEKVTIRCITSTDIDDDMNWYQQKPGEPPKLLISEGNTLRPGVPSRFSSSGYGTDFVFTIENTLSEDVADYYCLQSDNMPLTFGAGTKLELK

SEQ ID NO: 203 - protein, 450 aa, Artificial Sequence
  Description of Artificial Sequence: Synthetic polypeptide
QVQLQQPGAELVKPGASVKLSCKASGYTFTSYWMHWVNRRPGQGLEWIGEINPSNGDSYYNEKFKRKATLTVDISSSTAYMQLSSLTSEDSAVYYCTRSMYYDGRAGAYWGQGTTVTVSSASTKGPSVFPLAPSSKSTSGGTAALGCLVKDYFPEPVTVSWNSGALTSGVHTFPAVLQSSGLYSLSSVVTVPSSSLGTQTYICNVNHKPSNTKVDKKVEPKSCDKTHTCPPCPAPELLGGPSVFLFPPKPKDTLMISRTPEVTCVVVDVSHEDPEVKFNWYVDGVEVHNAKTKPREEQYNSTYRVVSVLTVLHQDWLNGKEYKCKVSNKALPAPIEKTISKAKGQPREPQVYTLPPSREEMTKNQVSLTCLVKGFYPSDIAVEWESNGQPENNYKTTPPVLDSDGSFFLYSKLTVDKSRWQQGNVFSCSVMHEALHNHYTQKSLSLSPGK

SEQ ID NO: 204 - protein, 214 aa, Artificial Sequence
  Description of Artificial Sequence: Synthetic polypeptide
DIVLTQSPASLSVATGEKVTIRCITSTDIDDDMNWYQQKPGEPPKLLISEGNTLRPGVPSRFSSSGYGTDFVFTIENTLSEDVADYYCLQSDNMPLTFGAGTKLELKRTVAAPSVFIFPPSDEQLKSGTASVVCLLNNFYPREAKVQWKVDNALQSGNSQESVTEQDSKDSTYSLSSTLTLSKADYEKHKVYACEVTHQGLSSPVTKSFNRGEC

SEQ ID NO: 205 - protein, 5 aa, Artificial Sequence
  Description of Artificial Sequence: Synthetic peptide
NYWIH

SEQ ID NO: 206 - protein, 17 aa, Artificial Sequence
  Description of Artificial Sequence: Synthetic peptide
NIDPSDSETHYNQKFKD

SEQ ID NO: 207 - protein, 8 aa, Artificial Sequence
  Description of Artificial Sequence: Synthetic peptide
GLTGTGYY

SEQ ID NO: 208 - protein, 11 aa, Artificial Sequence
  Description of Artificial Sequence: Synthetic peptide
RASQDISPYLN

SEQ ID NO: 209 - protein, 7 aa, Artificial Sequence
  Description of Artificial Sequence: Synthetic peptide
YTSKLHS

SEQ ID NO: 210 - protein, 9 aa, Artificial Sequence
  Description of Artificial Sequence: Synthetic peptide
QQDNTLPYT

SEQ ID NO: 211 - protein, 7 aa, Artificial Sequence
  Description of Artificial Sequence: Synthetic peptide
GYTFTNY

SEQ ID NO: 212 - protein, 6 aa, Artificial Sequence
  Description of Artificial Sequence: Synthetic peptide
DPSDSE

SEQ ID NO: 213 - protein, 7 aa, Artificial Sequence
  Description of Artificial Sequence: Synthetic peptide
GLTGTGY

SEQ ID NO: 214 - protein, 7 aa, Artificial Sequence
  Description of Artificial Sequence: Synthetic peptide
SQDISPY

SEQ ID NO: 215 - protein, 3 aa, Artificial Sequence
  Description of Artificial Sequence: Synthetic peptide
YTS

SEQ ID NO: 216 - protein, 6 aa, Artificial Sequence
  Description of Artificial Sequence: Synthetic peptide
DNTLPY

SEQ ID NO: 217 - protein, 10 aa, Artificial Sequence
  Description of Artificial Sequence: Synthetic peptide
GYTFTNYWIH

SEQ ID NO: 218 - protein, 10 aa, Artificial Sequence
  Description of Artificial Sequence: Synthetic peptide
NIDPSDSETH

SEQ ID NO: 219 - protein, 8 aa, Artificial Sequence
  Description of Artificial Sequence: Synthetic peptide
GLTGTGYY

SEQ ID NO: 220 - protein, 11 aa, Artificial Sequence
  Description of Artificial Sequence: Synthetic peptide
RASQDISPYLN

SEQ ID NO: 221 - protein, 7 aa, Artificial Sequence
  Description of Artificial Sequence: Synthetic peptide
YTSKLHS

SEQ ID NO: 222 - protein, 9 aa, Artificial Sequence
  Description of Artificial Sequence: Synthetic peptide
QQDNTLPYT

SEQ ID NO: 223 - protein, 6 aa, Artificial Sequence
  Description of Artificial Sequence: Synthetic peptide
TNYWIH

SEQ ID NO: 224 - protein, 13 aa, Artificial Sequence
  Description of Artificial Sequence: Synthetic peptide
WIGNIDPSDSETH

SEQ ID NO: 225 - protein, 9 aa, Artificial Sequence
  Description of Artificial Sequence: Synthetic peptide
ASGLTGTGY

SEQ ID NO: 226 - protein, 7 aa, Artificial Sequence
  Description of Artificial Sequence: Synthetic peptide
SPYLNWY

SEQ ID NO: 227 - protein, 10 aa, Artificial Sequence
  Description of Artificial Sequence: Synthetic peptide
LLIYYTSKLH

SEQ ID NO: 228 - protein, 8 aa, Artificial Sequence
  Description of Artificial Sequence: Synthetic peptide
QQDNTLPY

SEQ ID NO: 229 - protein, 8 aa, Artificial Sequence
  Description of Artificial Sequence: Synthetic peptide
GYTFTNYW

SEQ ID NO: 230 - protein, 8 aa, Artificial Sequence
  Description of Artificial Sequence: Synthetic peptide
IDPSDSET

SEQ ID NO: 231 - protein, 10 aa, Artificial Sequence
  Description of Artificial Sequence: Synthetic peptide
ASGLTGTGYY

SEQ ID NO: 232 - protein, 6 aa, Artificial Sequence
  Description of Artificial Sequence: Synthetic peptide
QDISPY

SEQ ID NO: 233 - protein, 3 aa, Artificial Sequence
  Description of Artificial Sequence: Synthetic peptide
YTS

SEQ ID NO: 234 - protein, 9 aa, Artificial Sequence
  Description of Artificial Sequence: Synthetic peptide
QQDNTLPYT

SEQ ID NO: 235 - protein, 117 aa, Artificial Sequence
  Description of Artificial Sequence: Synthetic polypeptide
EVQLQQSGAELVKPGASVKLSCKASGYTFTNYWIHWVKQRPGQGLEWIGNIDPSDSETHYNQKFKDKATLTVDKSSSTAYMQLISLTSEDSAVYYCASGLTGTGYYWGQGTTLTVSS

SEQ ID NO: 236 - protein, 107 aa, Artificial Sequence
  Description of Artificial Sequence: Synthetic polypeptide
DIQMTQTTSSLSASLGDRVTITCRASQDISPYLNWYQQKPEGTIKLLIYYTSKLHSGVPSRFSGSGSGTDYSLTISNLEQEDIATYFCQQDNTLPYTFGSGTKLELK

SEQ ID NO: 237 - protein, 447 aa, Artificial Sequence
  Description of Artificial Sequence: Synthetic polypeptide
EVQLQQSGAELVKPGASVKLSCKASGYTFTNYWIHWVKQRPGQGLEWIGNIDPSDSETHYNQKFKDKATLTVDKSSSTAYMQLISLTSEDSAVYYCASGLTGTGYYWGQGTTLTVSSASTKGPSVFPLAPSSKSTSGGTAALGCLVKDYFPEPVTVSWNSGALTSGVHTFPAVLQSSGLYSLSSVVTVPSSSLGTQTYICNVNHKPSNTKVDKKVEPKSCDKTHTCPPCPAPELLGGPSVFLFPPKPKDTLMISRTPEVTCVVVDVSHEDPEVKFNWYVDGVEVHNAKTKPREEQYNSTYRVVSVLTVLHQDWLNGKEYKCKVSNKALPAPIEKTISKAKGQPREPQVYTLPPSREEMTKNQVSLTCLVKGFYPSDIAVEWESNGQPENNYKTTPPVLDSDGSFFLYSKLTVDKSRWQQGNVFSCSVMHEALHNHYTQKSLSLSPGK

SEQ ID NO: 238 - protein, 214 aa, Artificial Sequence
  Description of Artificial Sequence: Synthetic polypeptide
DIQMTQTTSSLSASLGDRVTITCRASQDISPYLNWYQQKPEGTIKLLIYYTSKLHSGVPSRFSGSGSGTDYSLTISNLEQEDIATYFCQQDNTLPYTFGSGTKLELKRTVAAPSVFIFPPSDEQLKSGTASVVCLLNNFYPREAKVQWKVDNALQSGNSQESVTEQDSKDSTYSLSSTLTLSKADYEKHKVYACEVTHQGLSSPVTKSFNRGEC

SEQ ID NO: 239 - protein, 5 aa, Artificial Sequence
  Description of Artificial Sequence: Synthetic peptide
DYYMN

SEQ ID NO: 240 - protein, 17 aa, Artificial Sequence
  Description of Artificial Sequence: Synthetic peptide
RVIPNNGGTIYNQKFKD

SEQ ID NO: 241 - protein, 15 aa, Artificial Sequence
  Description of Artificial Sequence: Synthetic peptide
EDYSNQGFFLDAMDY

SEQ ID NO: 242 - protein, 11 aa, Artificial Sequence
  Description of Artificial Sequence: Synthetic peptide
RASQTISHFLH

SEQ ID NO: 243 - protein, 7 aa, Artificial Sequence
  Description of Artificial Sequence: Synthetic peptide
YASQSIS

SEQ ID NO: 244 - protein, 9 aa, Artificial Sequence
  Description of Artificial Sequence: Synthetic peptide
QSGHSFPYT

SEQ ID NO: 245 - protein, 7 aa, Artificial Sequence
  Description of Artificial Sequence: Synthetic peptide
GYTFTDY

SEQ ID NO: 246 - protein, 6 aa, Artificial Sequence
  Description of Artificial Sequence: Synthetic peptide
IPNNGG

SEQ ID NO: 247 - protein, 14 aa, Artificial Sequence
  Description of Artificial Sequence: Synthetic peptide
EDYSNQGFFLDAMD

SEQ ID NO: 248 - protein, 7 aa, Artificial Sequence
  Description of Artificial Sequence: Synthetic peptide
SQTISHF

SEQ ID NO: 249 - protein, 3 aa, Artificial Sequence
  Description of Artificial Sequence: Synthetic peptide
YAS

SEQ ID NO: 250 - protein, 6 aa, Artificial Sequence
  Description of Artificial Sequence: Synthetic peptide
GHSFPY

SEQ ID NO: 251 - protein, 10 aa, Artificial Sequence
  Description of Artificial Sequence: Synthetic peptide
GYTFTDYYMN

SEQ ID NO: 252 - protein, 10 aa, Artificial Sequence
  Description of Artificial Sequence: Synthetic peptide
RVIPNNGGTI

SEQ ID NO: 253 - protein, 15 aa, Artificial Sequence
  Description of Artificial Sequence: Synthetic peptide
EDYSNQGFFLDAMDY

SEQ ID NO: 254 - protein, 11 aa, Artificial Sequence
  Description of Artificial Sequence: Synthetic peptide
RASQTISHFLH

SEQ ID NO: 255 - protein, 7 aa, Artificial Sequence
  Description of Artificial Sequence: Synthetic peptide
YASQSIS

SEQ ID NO: 256 - protein, 9 aa, Artificial Sequence
  Description of Artificial Sequence: Synthetic peptide
QSGHSFPYT

SEQ ID NO: 257 - protein, 6 aa, Artificial Sequence
  Description of Artificial Sequence: Synthetic peptide
TDYYMN

SEQ ID NO: 258 - protein, 13 aa, Artificial Sequence
  Description of Artificial Sequence: Synthetic peptide
WIGRVIPNNGGTI

SEQ ID NO: 259 - protein, 16 aa, Artificial Sequence
  Description of Artificial Sequence: Synthetic peptide
AREDYSNQGFFLDAMD

SEQ ID NO: 260 - protein, 7 aa, Artificial Sequence
  Description of Artificial Sequence: Synthetic peptide
SHFLHWY

SEQ ID NO: 261 - protein, 10 aa, Artificial Sequence
  Description of Artificial Sequence: Synthetic peptide
LLIKYASQSI

SEQ ID NO: 262 - protein, 8 aa, Artificial Sequence
  Description of Artificial Sequence: Synthetic peptide
QSGHSFPY

SEQ ID NO: 263 - protein, 8 aa, Artificial Sequence
  Description of Artificial Sequence: Synthetic peptide
GYTFTDYY

SEQ ID NO: 264 - protein, 8 aa, Artificial Sequence
  Description of Artificial Sequence: Synthetic peptide
VIPNNGGT

SEQ ID NO: 265 - protein, 17 aa, Artificial Sequence
  Description of Artificial Sequence: Synthetic peptide
AREDYSNQGFFLDAMDY

SEQ ID NO: 266 - protein, 6 aa, Artificial Sequence
  Description of Artificial Sequence: Synthetic peptide
QTISHF

SEQ ID NO: 267 - protein, 3 aa, Artificial Sequence
  Description of Artificial Sequence: Synthetic peptide
YAS

SEQ ID NO: 268 - protein, 9 aa, Artificial Sequence
  Description of Artificial Sequence: Synthetic peptide
QSGHSFPYT

SEQ ID NO: 269 - protein, 124 aa, Artificial Sequence
  Description of Artificial Sequence: Synthetic polypeptide
EVQLQQSGPELVKPGASVKMSCKASGYTFTDYYMNWVKQSHGKSLEWIGRVIPNNGGTIYNQKFKDKATLTVDKSLSTAYMQLNSLTSEDSAVYYCAREDYSNQGFFLDAMDYWGQGTSVTVSS

SEQ ID NO: 270 - protein, 107 aa, Artificial Sequence
  Description of Artificial Sequence: Synthetic polypeptide
DIVMTQSPATLSVTPGERVSLSCRASQTISHFLHWYQQKSHESPRLLIKYASQSISGIPSRFSGGGSGSDFILTINSVEPEDVGMYYCQSGHSFPYTFGSGTKLEIK

SEQ ID NO: 271 - protein, 454 aa, Artificial Sequence
  Description of Artificial Sequence: Synthetic polypeptide
EVQLQQSGPELVKPGASVKMSCKASGYTFTDYYMNWVKQSHGKSLEWIGRVIPNNGGTIYNQKFKDKATLTVDKSLSTAYMQLNSLTSEDSAVYYCAREDYSNQGFFLDAMDYWGQGTSVTVSSASTKGPSVFPLAPSSKSTSGGTAALGCLVKDYFPEPVTVSWNSGALTSGVHTFPAVLQSSGLYSLSSVVTVPSSSLGTQTYICNVNHKPSNTKVDKKVEPKSCDKTHTCPPCPAPELLGGPSVFLFPPKPKDTLMISRTPEVTCVVVDVSHEDPEVKFNWYVDGVEVHNAKTKPREEQYNSTYRVVSVLTVLHQDWLNGKEYKCKVSNKALPAPIEKTISKAKGQPREPQVYTLPPSREEMTKNQVSLTCLVKGFYPSDIAVEWESNGQPENNYKTTPPVLDSDGSFFLYSKLTVDKSRWQQGNVFSCSVMHEALHNHYTQKSLSLSPGK

SEQ ID NO: 272 - protein, 214 aa, Artificial Sequence
  Description of Artificial Sequence: Synthetic polypeptide
DIVMTQSPATLSVTPGERVSLSCRASQTISHFLHWYQQKSHESPRLLIKYASQSISGIPSRFSGGGSGSDFILTINSVEPEDVGMYYCQSGHSFPYTFGSGTKLEIKRTVAAPSVFIFPPSDEQLKSGTASVVCLLNNFYPREAKVQWKVDNALQSGNSQESVTEQDSKDSTYSLSSTLTLSKADYEKHKVYACEVTHQGLSSPVTKSFNRGEC

SEQ ID NO: 273 - protein, 5 aa, Artificial Sequence
  Description of Artificial Sequence: Synthetic peptide
DYYMN

SEQ ID NO: 274 - protein, 17 aa, Artificial Sequence
  Description of Artificial Sequence: Synthetic peptide
RVIPRNGATTYNQNFRG

SEQ ID NO: 275 - protein, 15 aa, Artificial Sequence
  Description of Artificial Sequence: Synthetic peptide
EDFSNQGFFLDAMDY

SEQ ID NO: 276 - protein, 11 aa, Artificial Sequence
  Description of Artificial Sequence: Synthetic peptide
RASQSISHYLH

SEQ ID NO: 277 - protein, 7 aa, Artificial Sequence
  Description of Artificial Sequence: Synthetic peptide
YASQSIS

SEQ ID NO: 278 - protein, 9 aa, Artificial Sequence
  Description of Artificial Sequence: Synthetic peptide
QNGHSFPYT

SEQ ID NO: 279 - protein, 7 aa, Artificial Sequence
  Description of Artificial Sequence: Synthetic peptide
GYSFTDY

SEQ ID NO: 280 - protein, 6 aa, Artificial Sequence
  Description of Artificial Sequence: Synthetic peptide
IPRNGA

SEQ ID NO: 281 - protein, 14 aa, Artificial Sequence
  Description of Artificial Sequence: Synthetic peptide
EDFSNQGFFLDAMD

SEQ ID NO: 282 - protein, 7 aa, Artificial Sequence
  Description of Artificial Sequence: Synthetic peptide
SQSISHY

SEQ ID NO: 283 - protein, 3 aa, Artificial Sequence
  Description of Artificial Sequence: Synthetic peptide
YAS

SEQ ID NO: 284 - protein, 6 aa, Artificial Sequence
  Description of Artificial Sequence: Synthetic peptide
GHSFPY

SEQ ID NO: 285 - protein, 10 aa, Artificial Sequence
  Description of Artificial Sequence: Synthetic peptide
GYSFTDYYMN

SEQ ID NO: 286 - protein, 10 aa, Artificial Sequence
  Description of Artificial Sequence: Synthetic peptide
RVIPRNGATT

SEQ ID NO: 287 - protein, 15 aa, Artificial Sequence
  Description of Artificial Sequence: Synthetic peptide
EDFSNQGFFLDAMDY

SEQ ID NO: 288 - protein, 11 aa, Artificial Sequence
  Description of Artificial Sequence: Synthetic peptide
RASQSISHYLH

SEQ ID NO: 289 - protein, 7 aa, Artificial Sequence
  Description of Artificial Sequence: Synthetic peptide
YASQSIS

SEQ ID NO: 290 - protein, 9 aa, Artificial Sequence
  Description of Artificial Sequence: Synthetic peptide
QNGHSFPYT

SEQ ID NO: 291 - protein, 6 aa, Artificial Sequence
  Description of Artificial Sequence: Synthetic peptide
TDYYMN

SEQ ID NO: 292 - protein, 13 aa, Artificial Sequence
  Description of Artificial Sequence: Synthetic peptide
WIGRVIPRNGATT

SEQ ID NO: 293 - protein, 16 aa, Artificial Sequence
  Description of Artificial Sequence: Synthetic peptide
AREDFSNQGFFLDAMD

SEQ ID NO: 294 - protein, 7 aa, Artificial Sequence
  Description of Artificial Sequence: Synthetic peptide
SHYLHWY

SEQ ID NO: 295 - protein, 10 aa, Artificial Sequence
  Description of Artificial Sequence: Synthetic peptide
LLIKYASQSI

SEQ ID NO: 296 - protein, 8 aa, Artificial Sequence
  Description of Artificial Sequence: Synthetic peptide
QNGHSFPY

SEQ ID NO: 297 - protein, 8 aa, Artificial Sequence
  Description of Artificial Sequence: Synthetic peptide
GYSFTDYY

SEQ ID NO: 298 - protein, 8 aa, Artificial Sequence
  Description of Artificial Sequence: Synthetic peptide
VIPRNGAT

SEQ ID NO: 299 - protein, 17 aa, Artificial Sequence
  Description of Artificial Sequence: Synthetic peptide
AREDFSNQGFFLDAMDY

SEQ ID NO: 300 - protein, 6 aa, Artificial Sequence
  Description of Artificial Sequence: Synthetic peptide
QSISHY

SEQ ID NO: 301 - protein, 3 aa, Artificial Sequence
  Description of Artificial Sequence: Synthetic peptide
YAS

SEQ ID NO: 302 - protein, 9 aa, Artificial Sequence
  Description of Artificial Sequence: Synthetic peptide
QNGHSFPYT

SEQ ID NO: 303 - protein, 124 aa, Artificial Sequence
  Description of Artificial Sequence: Synthetic polypeptide
QVQLQQSGPELVKPGASVKMSCKASGYSFTDYYMNWVKQSHGQSLEWIGRVIPRNGATTYNQNFRGKATLTVDISLRTAYMHLNSLTSDDSAVYYCAREDFSNQGFFLDAMDYWGQGTSVTVSS

SEQ ID NO: 304 - protein, 107 aa, Artificial Sequence
  Description of Artificial Sequence: Synthetic polypeptide
DIVMTQSPATLSVTPGDRVSLSCRASQSISHYLHWYQQKSHESPRLLIKYASQSISGIPSRFSGSGSGSDFTLSINSVEPEDVGVYYCQNGHSFPYTFGSGTKLEMK

SEQ ID NO: 305 - protein, 454 aa, Artificial Sequence
  Description of Artificial Sequence: Synthetic polypeptide
QVQLQQSGPELVKPGASVKMSCKASGYSFTDYYMNWVKQSHGQSLEWIGRVIPRNGATTYNQNFRGKATLTVDISLRTAYMHLNSLTSDDSAVYYCAREDFSNQGFFLDAMDYWGQGTSVTVSSASTKGPSVFPLAPSSKSTSGGTAALGCLVKDYFPEPVTVSWNSGALTSGVHTFPAVLQSSGLYSLSSVVTVPSSSLGTQTYICNVNHKPSNTKVDKKVEPKSCDKTHTCPPCPAPELLGGPSVFLFPPKPKDTLMISRTPEVTCVVVDVSHEDPEVKFNWYVDGVEVHNAKTKPREEQYNSTYRVVSVLTVLHQDWLNGKEYKCKVSNKALPAPIEKTISKAKGQPREPQVYTLPPSREEMTKNQVSLTCLVKGFYPSDIAVEWESNGQPENNYKTTPPVLDSDGSFFLYSKLTVDKSRWQQGNVFSCSVMHEALHNHYTQKSLSLSPGK

SEQ ID NO: 306 - protein, 214 aa, Artificial Sequence
  Description of Artificial Sequence: Synthetic polypeptide
DIVMTQSPATLSVTPGDRVSLSCRASQSISHYLHWYQQKSHESPRLLIKYASQSISGIPSRFSGSGSGSDFTLSINSVEPEDVGVYYCQNGHSFPYTFGSGTKLEMKRTVAAPSVFIFPPSDEQLKSGTASVVCLLNNFYPREAKVQWKVDNALQSGNSQESVTEQDSKDSTYSLSSTLTLSKADYEKHKVYACEVTHQGLSSPVTKSFNRGEC

SEQ ID NO: 307 - protein, 5 aa, Artificial Sequence
  Description of Artificial Sequence: Synthetic peptide
NYWMH

SEQ ID NO: 308 - protein, 17 aa, Artificial Sequence
  Description of Artificial Sequence: Synthetic peptide
NIDPSDSETHYNQKFKD

SEQ ID NO: 309 - protein, 8 aa, Artificial Sequence
  Description of Artificial Sequence: Synthetic peptide
GLTGTGYY

SEQ ID NO: 310 - protein, 11 aa, Artificial Sequence
  Description of Artificial Sequence: Synthetic peptide
RASQDIRPYLN

SEQ ID NO: 311 - protein, 7 aa, Artificial Sequence
  Description of Artificial Sequence: Synthetic peptide
FTSKLHS

SEQ ID NO: 312 - protein, 9 aa, Artificial Sequence
  Description of Artificial Sequence: Synthetic peptide
QQDNTLPYT

SEQ ID NO: 313 - protein, 7 aa, Artificial Sequence
  Description of Artificial Sequence: Synthetic peptide
GYTFTNY

SEQ ID NO: 314 - protein, 6 aa, Artificial Sequence
  Description of Artificial Sequence: Synthetic peptide
DPSDSE

SEQ ID NO: 315 - protein, 7 aa, Artificial Sequence
  Description of Artificial Sequence: Synthetic peptide
GLTGTGY

SEQ ID NO: 316 - protein, 7 aa, Artificial Sequence
  Description of Artificial Sequence: Synthetic peptide
SQDIRPY

SEQ ID NO: 317 - protein, 3 aa, Artificial Sequence
  Description of Artificial Sequence: Synthetic peptide
FTS

SEQ ID NO: 318 - protein, 6 aa, Artificial Sequence
  Description of Artificial Sequence: Synthetic peptide
DNTLPY

SEQ ID NO: 319 - protein, 10 aa, Artificial Sequence
  Description of Artificial Sequence: Synthetic peptide
GYTFTNYWMH

SEQ ID NO: 320 - protein, 10 aa, Artificial Sequence
  Description of Artificial Sequence: Synthetic peptide
NIDPSDSETH

SEQ ID NO: 321 - protein, 8 aa, Artificial Sequence
  Description of Artificial Sequence: Synthetic peptide
GLTGTGYY

SEQ ID NO: 322 - protein, 11 aa, Artificial Sequence
  Description of Artificial Sequence: Synthetic peptide
RASQDIRPYLN

SEQ ID NO: 323 - protein, 7 aa, Artificial Sequence
  Description of Artificial Sequence: Synthetic peptide
FTSKLHS

SEQ ID NO: 324 - protein, 9 aa, Artificial Sequence
  Description of Artificial Sequence: Synthetic peptide
QQDNTLPYT

SEQ ID NO: 325 - protein, 6 aa, Artificial Sequence
  Description of Artificial Sequence: Synthetic peptide
TNYWMH

SEQ ID NO: 326 - protein, 13 aa, Artificial Sequence
  Description of Artificial Sequence: Synthetic peptide
WIGNIDPSDSETH

SEQ ID NO: 327 - protein, 9 aa, Artificial Sequence
  Description of Artificial Sequence: Synthetic peptide
ASGLTGTGY

SEQ ID NO: 328 - protein, 7 aa, Artificial Sequence
  Description of Artificial Sequence: Synthetic peptide
RPYLNWY

SEQ ID NO: 329 - protein, 10 aa, Artificial Sequence
  Description of Artificial Sequence: Synthetic peptide
LLIYFTSKLH

SEQ ID NO: 330 - protein, 8 aa, Artificial Sequence
  Description of Artificial Sequence: Synthetic peptide
QQDNTLPY

SEQ ID NO: 331 - protein, 8 aa, Artificial Sequence
  Description of Artificial Sequence: Synthetic peptide
GYTFTNYW

SEQ ID NO: 332 - protein, 8 aa, Artificial Sequence
  Description of Artificial Sequence: Synthetic peptide
IDPSDSET

SEQ ID NO: 333 - protein, 10 aa, Artificial Sequence
  Description of Artificial Sequence: Synthetic peptide
ASGLTGTGYY

SEQ ID NO: 334 - protein, 6 aa, Artificial Sequence
  Description of Artificial Sequence: Synthetic peptide
QDIRPY

SEQ ID NO: 335 - protein, 3 aa, Artificial Sequence
  Description of Artificial Sequence: Synthetic peptide
FTS

SEQ ID NO: 336 - protein, 9 aa, Artificial Sequence
  Description of Artificial Sequence: Synthetic peptide
QQDNTLPYT

SEQ ID NO: 337 - protein, 117 aa, Artificial Sequence
  Description of Artificial Sequence: Synthetic polypeptide
QVQLQQPGAELVKPGASVMLSCKASGYTFTNYWMHWVKQRPGQGLEWIGNIDPSDSETHYNQKFKDKATLTVDKSSSTAYMQLSSLTSEDSAVYYCASGLTGTGYYWGQGTTLTVSS

SEQ ID NO: 338 - protein, 107 aa, Artificial Sequence
  Description of Artificial Sequence: Synthetic polypeptide
DIQMTQTTSSLSASLGDRVTITCRASQDIRPYLNWYQQKPEGTIKLLIYFTSKLHSGVPSRFSGSGSGTDYSLTISNLEQEDIATYFCQQDNTLPYTFGSGTKLELK

SEQ ID NO: 339 - protein, 447 aa, Artificial Sequence
  Description of Artificial Sequence: Synthetic polypeptide
QVQLQQPGAELVKPGASVMLSCKASGYTFTNYWMHWVKQRPGQGLEWIGNIDPSDSETHYNQKFKDKATLTVDKSSSTAYMQLSSLTSEDSAVYYCASGLTGTGYYWGQGTTLTVSSASTKGPSVFPLAPSSKSTSGGTAALGCLVKDYFPEPVTVSWNSGALTSGVHTFPAVLQSSGLYSLSSVVTVPSSSLGTQTYICNVNHKPSNTKVDKKVEPKSCDKTHTCPPCPAPELLGGPSVFLFPPKPKDTLMISRTPEVTCVVVDVSHEDPEVKFNWYVDGVEVHNAKTKPREEQYNSTYRVVSVLTVLHQDWLNGKEYKCKVSNKALPAPIEKTISKAKGQPREPQVYTLPPSREEMTKNQVSLTCLVKGFYPSDIAVEWESNGQPENNYKTTPPVLDSDGSFFLYSKLTVDKSRWQQGNVFSCSVMHEALHNHYTQKSLSLSPGK

SEQ ID NO: 340 - protein, 214 aa, Artificial Sequence
  Description of Artificial Sequence: Synthetic polypeptide
DIQMTQTTSSLSASLGDRVTITCRASQDIRPYLNWYQQKPEGTIKLLIYFTSKLHSGVPSRFSGSGSGTDYSLTISNLEQEDIATYFCQQDNTLPYTFGSGTKLELKRTVAAPSVFIFPPSDEQLKSGTASVVCLLNNFYPREAKVQWKVDNALQSGNSQESVTEQDSKDSTYSLSSTLTLSKADYEKHKVYACEVTHQGLSSPVTKSFNRGEC

SEQ ID NO: 341 - protein, 5 aa, Artificial Sequence
  Description of Artificial Sequence: Synthetic peptide
DYYMD

SEQ ID NO: 342 - protein, 17 aa, Artificial Sequence
  Description of Artificial Sequence: Synthetic peptide
YIYPNNGITSYNQKFKG

SEQ ID NO: 343 - protein, 12 aa, Artificial Sequence
  Description of Artificial Sequence: Synthetic peptide
SIYYDHGGGFPY

SEQ ID NO: 344 - protein, 11 aa, Artificial Sequence
  Description of Artificial Sequence: Synthetic peptide
KASQNVDKYVA

SEQ ID NO: 345 - protein, 7 aa, Artificial Sequence
  Description of Artificial Sequence: Synthetic peptide
SASYRYS

SEQ ID NO: 346 - protein, 8 aa, Artificial Sequence
  Description of Artificial Sequence: Synthetic peptide
QQYNTYPS

SEQ ID NO: 347 - protein, 7 aa, Artificial Sequence
  Description of Artificial Sequence: Synthetic peptide
GYIFTDY

SEQ ID NO: 348 - protein, 6 aa, Artificial Sequence
  Description of Artificial Sequence: Synthetic peptide
YPNNGI

SEQ ID NO: 349 - protein, 11 aa, Artificial Sequence
  Description of Artificial Sequence: Synthetic peptide
SIYYDHGGGFP

SEQ ID NO: 350 - protein, 7 aa, Artificial Sequence
  Description of Artificial Sequence: Synthetic peptide
SQNVDKY

SEQ ID NO: 351 - protein, 3 aa, Artificial Sequence
  Description of Artificial Sequence: Synthetic peptide
SAS

SEQ ID NO: 352 - protein, 5 aa, Artificial Sequence
  Description of Artificial Sequence: Synthetic peptide
YNTYP

SEQ ID NO: 353 - protein, 10 aa, Artificial Sequence
  Description of Artificial Sequence: Synthetic peptide
GYIFTDYYMD

SEQ ID NO: 354 - protein, 10 aa, Artificial Sequence
  Description of Artificial Sequence: Synthetic peptide
YIYPNNGITS

SEQ ID NO: 355 - protein, 12 aa, Artificial Sequence
  Description of Artificial Sequence: Synthetic peptide
SIYYDHGGGFPY

SEQ ID NO: 356 - protein, 11 aa, Artificial Sequence
  Description of Artificial Sequence: Synthetic peptide
KASQNVDKYVA

SEQ ID NO: 357 - protein, 7 aa, Artificial Sequence
  Description of Artificial Sequence: Synthetic peptide
SASYRYS

SEQ ID NO: 358 - protein, 8 aa, Artificial Sequence
  Description of Artificial Sequence: Synthetic peptide
QQYNTYPS

SEQ ID NO: 359 - protein, 6 aa, Artificial Sequence
  Description of Artificial Sequence: Synthetic peptide
TDYYMD

SEQ ID NO: 360 - protein, 13 aa, Artificial Sequence
  Description of Artificial Sequence: Synthetic peptide
WIGYIYPNNGITS

SEQ ID NO: 361 - protein, 13 aa, Artificial Sequence
  Description of Artificial Sequence: Synthetic peptide
ARSIYYDHGGGFP

SEQ ID NO: 362 - protein, 7 aa, Artificial Sequence
  Description of Artificial Sequence: Synthetic peptide
DKYVAWY

SEQ ID NO: 363 - protein, 10 aa, Artificial Sequence
  Description of Artificial Sequence: Synthetic peptide
ALIYSASYRY

SEQ ID NO: 364 - protein, 7 aa, Artificial Sequence
  Description of Artificial Sequence: Synthetic peptide
QQYNTYP

SEQ ID NO: 365 - protein, 8 aa, Artificial Sequence
  Description of Artificial Sequence: Synthetic peptide
GYIFTDYY

SEQ ID NO: 366 - protein, 8 aa, Artificial Sequence
  Description of Artificial Sequence: Synthetic peptide
IYPNNGIT

SEQ ID NO: 367 - protein, 14 aa, Artificial Sequence
  Description of Artificial Sequence: Synthetic peptide
ARSIYYDHGGGFPY

SEQ ID NO: 368 - protein, 6 aa, Artificial Sequence
  Description of Artificial Sequence: Synthetic peptide
QNVDKY

SEQ ID NO: 369 - protein, 3 aa, Artificial Sequence
  Description of Artificial Sequence: Synthetic peptide
SAS

SEQ ID NO: 370 - protein, 8 aa, Artificial Sequence
  Description of Artificial Sequence: Synthetic peptide
QQYNTYPS

SEQ ID NO: 371 - protein, 121 aa, Artificial Sequence
  Description of Artificial Sequence: Synthetic polypeptide
EVQLQQSGPELVKPGDSMKMSCKASGYIFTDYYMDWVKQSHGKSLEWIGYIYPNNGITSYNQKFKGRATLTIDKSSSTAYMELHSLTSEDSAVYYCARSIYYDHGGGFPYWGQGTSVTVSS

SEQ ID NO: 372 - protein, 106 aa, Artificial Sequence
  Description of Artificial Sequence: Synthetic polypeptide
DIVLTQSQKFMSTSVGDRVSVTCKASQNVDKYVAWYQQKPGQSPKALIYSASYRYSGVPDRFTGSGSGTDFTLTISNVQSEDLAEYFCQQYNTYPSFGSGTKLEMK

SEQ ID NO: 373 - protein, 451 aa, Artificial Sequence
  Description of Artificial Sequence: Synthetic polypeptide
EVQLQQSGPELVKPGDSMKMSCKASGYIFTDYYMDWVKQSHGKSLEWIGYIYPNNGITSYNQKFKGRATLTIDKSSSTAYMELHSLTSEDSAVYYCARSIYYDHGGGFPYWGQGTSVTVSSASTKGPSVFPLAPSSKSTSGGTAALGCLVKDYFPEPVTVSWNSGALTSGVHTFPAVLQSSGLYSLSSVVTVPSSSLGTQTYICNVNHKPSNTKVDKKVEPKSCDKTHTCPPCPAPELLGGPSVFLFPPKPKDTLMISRTPEVTCVVVDVSHEDPEVKFNWYVDGVEVHNAKTKPREEQYNSTYRVVSVLTVLHQDWLNGKEYKCKVSNKALPAPIEKTISKAKGQPREPQVYTLPPSREEMTKNQVSLTCLVKGFYPSDIAVEWESNGQPENNYKTTPPVLDSDGSFFLYSKLTVDKSRWQQGNVFSCSVMHEALHNHYTQKSLSLSPGK

SEQ ID NO: 374 - protein, 213 aa, Artificial Sequence
  Description of Artificial Sequence: Synthetic polypeptide
DIVLTQSQKFMSTSVGDRVSVTCKASQNVDKYVAWYQQKPGQSPKALIYSASYRYSGVPDRFTGSGSGTDFTLTISNVQSEDLAEYFCQQYNTYPSFGSGTKLEMKRTVAAPSVFIFPPSDEQLKSGTASVVCLLNNFYPREAKVQWKVDNALQSGNSQESVTEQDSKDSTYSLSSTLTLSKADYEKHKVYACEVTHQGLSSPVTKSFNRGEC

SEQ ID NO: 375 - protein, 5 aa, Artificial Sequence
  Description of Artificial Sequence: Synthetic peptide
DYYMN

SEQ ID NO: 376 - protein, 17 aa, Artificial Sequence
  Description of Artificial Sequence: Synthetic peptide
RVIPSNGGTIYNLKFKG

SEQ ID NO: 377 - protein, 15 aa, Artificial Sequence
  Description of Artificial Sequence: Synthetic peptide
EDYNNQGFFLDAMDY

SEQ ID NO: 378 - protein, 11 aa, Artificial Sequence
  Description of Artificial Sequence: Synthetic peptide
RASQSISDFLH

SEQ ID NO: 379 - protein, 7 aa, Artificial Sequence
  Description of Artificial Sequence: Synthetic peptide
YASQSIS

SEQ ID NO: 380 - protein, 9 aa, Artificial Sequence
  Description of Artificial Sequence: Synthetic peptide
QNGHSFPYT

SEQ ID NO: 381 - protein, 7 aa, Artificial Sequence
  Description of Artificial Sequence: Synthetic peptide
GYTFTDY

SEQ ID NO: 382 - protein, 6 aa, Artificial Sequence
  Description of Artificial Sequence: Synthetic peptide
IPSNGG

SEQ ID NO: 383 - protein, 14 aa, Artificial Sequence
  Description of Artificial Sequence: Synthetic peptide
EDYNNQGFFLDAMD

SEQ ID NO: 384 - protein, 7 aa, Artificial Sequence
  Description of Artificial Sequence: Synthetic peptide
SQSISDF

SEQ ID NO: 385 - protein, 3 aa, Artificial Sequence
  Description of Artificial Sequence: Synthetic peptide
YAS

SEQ ID NO: 386 - protein, 6 aa, Artificial Sequence
  Description of Artificial Sequence: Synthetic peptide
GHSFPY

SEQ ID NO: 387 - protein, 10 aa, Artificial Sequence
  Description of Artificial Sequence: Synthetic peptide
GYTFTDYYMN

SEQ ID NO: 388 - protein, 10 aa, Artificial Sequence
  Description of Artificial Sequence: Synthetic peptide
RVIPSNGGTI

SEQ ID NO: 389 - protein, 15 aa, Artificial Sequence
  Description of Artificial Sequence: Synthetic peptide
EDYNNQGFFLDAMDY

SEQ ID NO: 390 - protein, 11 aa, Artificial Sequence
  Description of Artificial Sequence: Synthetic peptide
RASQSISDFLH

SEQ ID NO: 391 - protein, 7 aa, Artificial Sequence
  Description of Artificial Sequence: Synthetic peptide
YASQSIS

SEQ ID NO: 392 - protein, 9 aa, Artificial Sequence
  Description of Artificial Sequence: Synthetic peptide
QNGHSFPYT

SEQ ID NO: 393 - protein, 6 aa, Artificial Sequence
  Description of Artificial Sequence: Synthetic peptide
TDYYMN

SEQ ID NO: 394 - protein, 13 aa, Artificial Sequence
  Description of Artificial Sequence: Synthetic peptide
WIGRVIPSNGGTI

SEQ ID NO: 395 - protein, 16 aa, Artificial Sequence
  Description of Artificial Sequence: Synthetic peptide
AREDYNNQGFFLDAMD

SEQ ID NO: 396 - protein, 7 aa, Artificial Sequence
  Description of Artificial Sequence: Synthetic peptide
SDFLHWY

SEQ ID NO: 397 - protein, 10 aa, Artificial Sequence
  Description of Artificial Sequence: Synthetic peptide
LLIKYASQSI

SEQ ID NO: 398 - protein, 8 aa, Artificial Sequence
  Description of Artificial Sequence: Synthetic peptide
QNGHSFPY

SEQ ID NO: 399 - protein, 8 aa, Artificial Sequence
  Description of Artificial Sequence: Synthetic peptide
GYTFTDYY

SEQ ID NO: 400 - protein, 8 aa, Artificial Sequence
  Description of Artificial Sequence: Synthetic peptide
VIPSNGGT

SEQ ID NO: 401 - protein, 17 aa, Artificial Sequence
  Description of Artificial Sequence: Synthetic peptide
AREDYNNQGFFLDAMDY

SEQ ID NO: 402 - protein, 6 aa, Artificial Sequence
  Description of Artificial Sequence: Synthetic peptide
QSISDF

SEQ ID NO: 403 - protein, 3 aa, Artificial Sequence
  Description of Artificial Sequence: Synthetic peptide
YAS

SEQ ID NO: 404 - protein, 9 aa, Artificial Sequence
  Description of Artificial Sequence: Synthetic peptide
QNGHSFPYT

SEQ ID NO: 405 - protein, 124 aa, Artificial Sequence
  Description of Artificial Sequence: Synthetic polypeptide
QVQLQQSGPELVKPGTSVKMSCKASGYTFTDYYMNWVKQSHGKSLEWIGRVIPSNGGTIYNLKFKGKATLTVDKSLSTAYMQLNSLTSEDSAVYFCAREDYNNQGFFLDAMDYWGQGTLVTVSA

SEQ ID NO: 406 - protein, 107 aa, Artificial Sequence
  Description of Artificial Sequence: Synthetic polypeptide
DIVMTQSPATLSVTPGDRVSLSCRASQSISDFLHWYQQKSHESPRLLIKYASQSISGIPSRFSGSGSGSDFTLTINSVEPEDVGVYYCQNGHSFPYTFGSGTKLEIK

SEQ ID NO: 407 - protein, 454 aa, Artificial Sequence
  Description of Artificial Sequence: Synthetic polypeptide
QVQLQQSGPELVKPGTSVKMSCKASGYTFTDYYMNWVKQSHGKSLEWIGRVIPSNGGTIYNLKFKGKATLTVDKSLSTAYMQLNSLTSEDSAVYFCAREDYNNQGFFLDAMDYWGQGTLVTVSAASTKGPSVFPLAPSSKSTSGGTAALGCLVKDYFPEPVTVSWNSGALTSGVHTFPAVLQSSGLYSLSSVVTVPSSSLGTQTYICNVNHKPSNTKVDKKVEPKSCDKTHTCPPCPAPELLGGPSVFLFPPKPKDTLMISRTPEVTCVVVDVSHEDPEVKFNWYVDGVEVHNAKTKPREEQYNSTYRVVSVLTVLHQDWLNGKEYKCKVSNKALPAPIEKTISKAKGQPREPQVYTLPPSREEMTKNQVSLTCLVKGFYPSDIAVEWESNGQPENNYKTTPPVLDSDGSFFLYSKLTVDKSRWQQGNVFSCSVMHEALHNHYTQKSLSLSPGK

SEQ ID NO: 408 - protein, 214 aa, Artificial Sequence
  Description of Artificial Sequence: Synthetic polypeptide
DIVMTQSPATLSVTPGDRVSLSCRASQSISDFLHWYQQKSHESPRLLIKYASQSISGIPSRFSGSGSGSDFTLTINSVEPEDVGVYYCQNGHSFPYTFGSGTKLEIKRTVAAPSVFIFPPSDEQLKSGTASVVCLLNNFYPREAKVQWKVDNALQSGNSQESVTEQDSKDSTYSLSSTLTLSKADYEKHKVYACEVTHQGLSSPVTKSFNRGEC

SEQ ID NO: 409 - protein, 5 aa, Artificial Sequence
  Description of Artificial Sequence: Synthetic peptide
DYYMD

SEQ ID NO: 410 - protein, 17 aa, Artificial Sequence
  Description of Artificial Sequence: Synthetic peptide
YIYPNNGDTRYNQKFKD

SEQ ID NO: 411 - protein, 12 aa, Artificial Sequence
  Description of Artificial Sequence: Synthetic peptide
SIYYDHGGGFPY

SEQ ID NO: 412 - protein, 11 aa, Artificial Sequence
  Description of Artificial Sequence: Synthetic peptide
KASQNVGTYVA

SEQ ID NO: 413 - protein, 7 aa, Artificial Sequence
  Description of Artificial Sequence: Synthetic peptide
SASYRYS

SEQ ID NO: 414 - protein, 8 aa, Artificial Sequence
  Description of Artificial Sequence: Synthetic peptide
QQYNSYPT

SEQ ID NO: 415 - protein, 7 aa, Artificial Sequence
  Description of Artificial Sequence: Synthetic peptide
GYTFTDY

SEQ ID NO: 416 - protein, 6 aa, Artificial Sequence
  Description of Artificial Sequence: Synthetic peptide
YPNNGD

SEQ ID NO: 417 - protein, 11 aa, Artificial Sequence
  Description of Artificial Sequence: Synthetic peptide
SIYYDHGGGFP

SEQ ID NO: 418 - protein, 7 aa, Artificial Sequence
  Description of Artificial Sequence: Synthetic peptide
SQNVGTY

SEQ ID NO: 419 - protein, 3 aa, Artificial Sequence
  Description of Artificial Sequence: Synthetic peptide
SAS

SEQ ID NO: 420 - protein, 5 aa, Artificial Sequence
  Description of Artificial Sequence: Synthetic peptide
YNSYP

SEQ ID NO: 421 - protein, 10 aa, Artificial Sequence
  Description of Artificial Sequence: Synthetic peptide
GYTFTDYYMD

SEQ ID NO: 422 - protein, 10 aa, Artificial Sequence
  Description of Artificial Sequence: Synthetic peptide
YIYPNNGDTR

SEQ ID NO: 423 - protein, 12 aa, Artificial Sequence
  Description of Artificial Sequence: Synthetic peptide
SIYYDHGGGFPY

SEQ ID NO: 424 - protein, 11 aa, Artificial Sequence
  Description of Artificial Sequence: Synthetic peptide
KASQNVGTYVA

SEQ ID NO: 425 - protein, 7 aa, Artificial Sequence
  Description of Artificial Sequence: Synthetic peptide
SASYRYS

SEQ ID NO: 426 - protein, 8 aa, Artificial Sequence
  Description of Artificial Sequence: Synthetic peptide
QQYNSYPT

SEQ ID NO: 427 - protein, 6 aa, Artificial Sequence
  Description of Artificial Sequence: Synthetic peptide
TDYYMD

SEQ ID NO: 428 - protein, 13 aa, Artificial Sequence
  Description of Artificial Sequence: Synthetic peptide
WIGYIYPNNGDTR

SEQ ID NO: 429 - protein, 13 aa, Artificial Sequence
  Description of Artificial Sequence: Synthetic peptide
ARSIYYDHGGGFP

SEQ ID NO: 430 - protein, 7 aa, Artificial Sequence
  Description of Artificial Sequence: Synthetic peptide
GTYVAWY

SEQ ID NO: 431 - protein, 10 aa, Artificial Sequence
  Description of Artificial Sequence: Synthetic peptide
ALIYSASYRY

SEQ ID NO: 432 - protein, 7 aa, Artificial Sequence
  Description of Artificial Sequence: Synthetic peptide
QQYNSYP

SEQ ID NO: 433 - protein, 8 aa, Artificial Sequence
  Description of Artificial Sequence: Synthetic peptide
GYTFTDYY

SEQ ID NO: 434 - protein, 8 aa, Artificial Sequence
  Description of Artificial Sequence: Synthetic peptide
IYPNNGDT

SEQ ID NO: 435 - protein, 14 aa, Artificial Sequence
  Description of Artificial Sequence: Synthetic peptide
ARSIYYDHGGGFPY

SEQ ID NO: 436 - protein, 6 aa, Artificial Sequence
  Description of Artificial Sequence: Synthetic peptide
QNVGTY

SEQ ID NO: 437 - protein, 3 aa, Artificial Sequence
  Description of Artificial Sequence: Synthetic peptide
SAS

SEQ ID NO: 438 - protein, 8 aa, Artificial Sequence
  Description of Artificial Sequence: Synthetic peptide
QQYNSYPT

SEQ ID NO: 439 - protein, 121 aa, Artificial Sequence
  Description of Artificial Sequence: Synthetic polypeptide
EVQLQQSGPELVKPGNSVKMSCKASGYTFTDYYMDWVKQSHGTSLEWIGYIYPNNGDTRYNQKFKDKATLTVDKSSSTAYMELHSLTSEDSAVFYCARSIYYDHGGGFPYWGQGTLVTVSA

SEQ ID NO: 440 - protein, 106 aa, Artificial Sequence
  Description of Artificial Sequence: Synthetic polypeptide
DIVMTQSQKFMSTSVGDRVSVTCKASQNVGTYVAWYQQKPGQSPKALIYSASYRYSGVPDRFTGSGSGTDFTLTINNVQSEDLAEYLCQQYNSYPTFGGGTRLEIK

SEQ ID NO: 441 - protein, 451 aa, Artificial Sequence
  Description of Artificial Sequence: Synthetic polypeptide
EVQLQQSGPELVKPGNSVKMSCKASGYTFTDYYMDWVKQSHGTSLEWIGYIYPNNGDTRYNQKFKDKATLTVDKSSSTAYMELHSLTSEDSAVFYCARSIYYDHGGGFPYWGQGTLVTVSAASTKGPSVFPLAPSSKSTSGGTAALGCLVKDYFPEPVTVSWNSGALTSGVHTFPAVLQSSGLYSLSSVVTVPSSSLGTQTYICNVNHKPSNTKVDKKVEPKSCDKTHTCPPCPAPELLGGPSVFLFPPKPKDTLMISRTPEVTCVVVDVSHEDPEVKFNWYVDGVEVHNAKTKPREEQYNSTYRVVSVLTVLHQDWLNGKEYKCKVSNKALPAPIEKTISKAKGQPREPQVYTLPPSREEMTKNQVSLTCLVKGFYPSDIAVEWESNGQPENNYKTTPPVLDSDGSFFLYSKLTVDKSRWQQGNVFSCSVMHEALHNHYTQKSLSLSPGK

SEQ ID NO: 442 - protein, 213 aa, Artificial Sequence
  Description of Artificial Sequence: Synthetic polypeptide
DIVMTQSQKFMSTSVGDRVSVTCKASQNVGTYVAWYQQKPGQSPKALIYSASYRYSGVPDRFTGSGSGTDFTLTINNVQSEDLAEYLCQQYNSYPTFGGGTRLEIKRTVAAPSVFIFPPSDEQLKSGTASVVCLLNNFYPREAKVQWKVDNALQSGNSQESVTEQDSKDSTYSLSSTLTLSKADYEKHKVYACEVTHQGLSSPVTKSFNRGEC

SEQ ID NO: 443 - protein, 7 aa, Artificial Sequence
  Description of Artificial Sequence: Synthetic peptide
TSGMNVG

SEQ ID NO: 444 - protein, 16 aa, Artificial Sequence
  Description of Artificial Sequence: Synthetic peptide
HIWWDDDKYYNPSLKS

SEQ ID NO: 445 - protein, 11 aa, Artificial Sequence
  Description of Artificial Sequence: Synthetic peptide
RGNYGNYEFAY

SEQ ID NO: 446 - protein, 11 aa, Artificial Sequence
  Description of Artificial Sequence: Synthetic peptide
RASQDIRNYLN

SEQ ID NO: 447 - protein, 7 aa, Artificial Sequence
  Description of Artificial Sequence: Synthetic peptide
HTSRLHS

SEQ ID NO: 448 - protein, 9 aa, Artificial Sequence
  Description of Artificial Sequence: Synthetic peptide
QQGNTLPWT

SEQ ID NO: 449 - protein, 9 aa, Artificial Sequence
  Description of Artificial Sequence: Synthetic peptide
GFSLSTSGM

SEQ ID NO: 450 - protein, 5 aa, Artificial Sequence
  Description of Artificial Sequence: Synthetic peptide
WWDDD

SEQ ID NO: 451 - protein, 10 aa, Artificial Sequence
  Description of Artificial Sequence: Synthetic peptide
RGNYGNYEFA

SEQ ID NO: 452 - protein, 7 aa, Artificial Sequence
  Description of Artificial Sequence: Synthetic peptide
SQDIRNY

SEQ ID NO: 453 - protein, 3 aa, Artificial Sequence
  Description of Artificial Sequence: Synthetic peptide
HTS

SEQ ID NO: 454 - protein, 6 aa, Artificial Sequence
  Description of Artificial Sequence: Synthetic peptide
GNTLPW

SEQ ID NO: 455 - protein, 12 aa, Artificial Sequence
  Description of Artificial Sequence: Synthetic peptide
GFSLSTSGMNVG

SEQ ID NO: 456 - protein, 9 aa, Artificial Sequence
  Description of Artificial Sequence: Synthetic peptide
HIWWDDDKY

SEQ ID NO: 457 - protein, 11 aa, Artificial Sequence
  Description of Artificial Sequence: Synthetic peptide
RGNYGNYEFAY

SEQ ID NO: 458 - protein, 11 aa, Artificial Sequence
  Description of Artificial Sequence: Synthetic peptide
RASQDIRNYLN

SEQ ID NO: 459 - protein, 7 aa, Artificial Sequence
  Description of Artificial Sequence: Synthetic peptide
HTSRLHS

SEQ ID NO: 460 - protein, 9 aa, Artificial Sequence
  Description of Artificial Sequence: Synthetic peptide
QQGNTLPWT

SEQ ID NO: 461 - protein, 8 aa, Artificial Sequence
  Description of Artificial Sequence: Synthetic peptide
STSGMNVG

SEQ ID NO: 462 - protein, 12 aa, Artificial Sequence
  Description of Artificial Sequence: Synthetic peptide
WLAHIWWDDDKY

SEQ ID NO: 463 - protein, 12 aa, Artificial Sequence
  Description of Artificial Sequence: Synthetic peptide
ARRGNYGNYEFA

SEQ ID NO: 464 - protein, 7 aa, Artificial Sequence
  Description of Artificial Sequence: Synthetic peptide
RNYLNWY

SEQ ID NO: 465 - protein, 10 aa, Artificial Sequence
  Description of Artificial Sequence: Synthetic peptide
LLIYHTSRLH

SEQ ID NO: 466 - protein, 8 aa, Artificial Sequence
  Description of Artificial Sequence: Synthetic peptide
QQGNTLPW

SEQ ID NO: 467 - protein, 10 aa, Artificial Sequence
  Description of Artificial Sequence: Synthetic peptide
GFSLSTSGMN

SEQ ID NO: 468 - protein, 7 aa, Artificial Sequence
  Description of Artificial Sequence: Synthetic peptide
IWWDDDK

SEQ ID NO: 469 - protein, 13 aa, Artificial Sequence
  Description of Artificial Sequence: Synthetic peptide
ARRGNYGNYEFAY

SEQ ID NO: 470 - protein, 6 aa, Artificial Sequence
  Description of Artificial Sequence: Synthetic peptide
QDIRNY

SEQ ID NO: 471 - protein, 3 aa, Artificial Sequence
  Description of Artificial Sequence: Synthetic peptide
HTS

SEQ ID NO: 472 - protein, 9 aa, Artificial Sequence
  Description of Artificial Sequence: Synthetic peptide
QQGNTLPWT

SEQ ID NO: 473 - protein, 121 aa, Artificial Sequence
  Description of Artificial Sequence: Synthetic polypeptide
QVQLKESGPGILKPSQTLSLTCSFSGFSLSTSGMNVGWIRQPSGKGLEWLAHIWWDDDKYYNPSLKSQLTISKDTSRNQVFLKITSVDTADTATYYCARRGNYGNYEFAYWGQGTTLTVSS

SEQ ID NO: 474 - protein, 107 aa, Artificial Sequence
  Description of Artificial Sequence: Synthetic polypeptide
DIQMTQTTSSLSASLGDRVTISCRASQDIRNYLNWYQQKPDGTVKLLIYHTSRLHSGVPSRFSGSGSGTDYSLTISNLEQEDIATYFCQQGNTLPWTFGAGTKLELK

SEQ ID NO: 475 - protein, 451 aa, Artificial Sequence
  Description of Artificial Sequence: Synthetic polypeptide
QVQLKESGPGILKPSQTLSLTCSFSGFSLSTSGMNVGWIRQPSGKGLEWLAHIWWDDDKYYNPSLKSQLTISKDTSRNQVFLKITSVDTADTATYYCARRGNYGNYEFAYWGQGTTLTVSSASTKGPSVFPLAPSSKSTSGGTAALGCLVKDYFPEPVTVSWNSGALTSGVHTFPAVLQSSGLYSLSSVVTVPSSSLGTQTYICNVNHKPSNTKVDKKVEPKSCDKTHTCPPCPAPELLGGPSVFLFPPKPKDTLMISRTPEVTCVVVDVSHEDPEVKFNWYVDGVEVHNAKTKPREEQYNSTYRVVSVLTVLHQDWLNGKEYKCKVSNKALPAPIEKTISKAKGQPREPQVYTLPPSREEMTKNQVSLTCLVKGFYPSDIAVEWESNGQPENNYKTTPPVLDSDGSFFLYSKLTVDKSRWQQGNVFSCSVMHEALHNHYTQKSLSLSPGK

SEQ ID NO: 476 - protein, 214 aa, Artificial Sequence
  Description of Artificial Sequence: Synthetic polypeptide
DIQMTQTTSSLSASLGDRVTISCRASQDIRNYLNWYQQKPDGTVKLLIYHTSRLHSGVPSRFSGSGSGTDYSLTISNLEQEDIATYFCQQGNTLPWTFGAGTKLELKRTVAAPSVFIFPPSDEQLKSGTASVVCLLNNFYPREAKVQWKVDNALQSGNSQESVTEQDSKDSTYSLSSTLTLSKADYEKHKVYACEVTHQGLSSPVTKSFNRGEC

SEQ ID NO: 477 - protein, 5 aa, Artificial Sequence
  Description of Artificial Sequence: Synthetic peptide
VYTIH

SEQ ID NO: 478 - protein, 17 aa, Artificial Sequence
  Description of Artificial Sequence: Synthetic peptide
WFYPGSGNIKYNEKFKD

SEQ ID NO: 479 - protein, 15 aa, Artificial Sequence
  Description of Artificial Sequence: Synthetic peptide
HEDNHYYDGNSWFAY

SEQ ID NO: 480 - protein, 11 aa, Artificial Sequence
  Description of Artificial Sequence: Synthetic peptide
RASGNIHNYLA

SEQ ID NO: 481 - protein, 7 aa, Artificial Sequence
  Description of Artificial Sequence: Synthetic peptide
NAKTLAD

SEQ ID NO: 482 - protein, 9 aa, Artificial Sequence
  Description of Artificial Sequence: Synthetic peptide
QHFWNTPYT

SEQ ID NO: 483 - protein, 7 aa, Artificial Sequence
  Description of Artificial Sequence: Synthetic peptide
GYTFTVY

SEQ ID NO: 484 - protein, 6 aa, Artificial Sequence
  Description of Artificial Sequence: Synthetic peptide
YPGSGN

SEQ ID NO: 485 - protein, 14 aa, Artificial Sequence
  Description of Artificial Sequence: Synthetic peptide
HEDNHYYDGNSWFA

SEQ ID NO: 486 - protein, 7 aa, Artificial Sequence
  Description of Artificial Sequence: Synthetic peptide
SGNIHNY

SEQ ID NO: 487 - protein, 3 aa, Artificial Sequence
  Description of Artificial Sequence: Synthetic peptide
NAK

SEQ ID NO: 488 - protein, 6 aa, Artificial Sequence
  Description of Artificial Sequence: Synthetic peptide
FWNTPY

SEQ ID NO: 489 - protein, 10 aa, Artificial Sequence
  Description of Artificial Sequence: Synthetic peptide
GYTFTVYTIH

SEQ ID NO: 490 - protein, 10 aa, Artificial Sequence
  Description of Artificial Sequence: Synthetic peptide
WFYPGSGNIK

SEQ ID NO: 491 - protein, 15 aa, Artificial Sequence
  Description of Artificial Sequence: Synthetic peptide
HEDNHYYDGNSWFAY

SEQ ID NO: 492 - protein, 11 aa, Artificial Sequence
  Description of Artificial Sequence: Synthetic peptide
RASGNIHNYLA

SEQ ID NO: 493 - protein, 7 aa, Artificial Sequence
  Description of Artificial Sequence: Synthetic peptide
NAKTLAD

SEQ ID NO: 494 - protein, 9 aa, Artificial Sequence
  Description of Artificial Sequence: Synthetic peptide
QHFWNTPYT

SEQ ID NO: 495 - protein, 6 aa, Artificial Sequence
  Description of Artificial Sequence: Synthetic peptide
TVYTIH

SEQ ID NO: 496 - protein, 13 aa, Artificial Sequence
  Description of Artificial Sequence: Synthetic peptide
WIGWFYPGSGNIK

SEQ ID NO: 497 - protein, 16 aa, Artificial Sequence
  Description of Artificial Sequence: Synthetic peptide
ARHEDNHYYDGNSWFA

SEQ ID NO: 498 - protein, 7 aa, Artificial Sequence
  Description of Artificial Sequence: Synthetic peptide
HNYLAWF

SEQ ID NO: 499 - protein, 10 aa, Artificial Sequence
  Description of Artificial Sequence: Synthetic peptide
LLVYNAKTLA

SEQ ID NO: 500 - protein, 8 aa, Artificial Sequence
  Description of Artificial Sequence: Synthetic peptide
QHFWNTPY

SEQ ID NO: 501 - protein, 8 aa, Artificial Sequence
  Description of Artificial Sequence: Synthetic peptide
GYTFTVYT

SEQ ID NO: 502 - protein, 8 aa, Artificial Sequence
  Description of Artificial Sequence: Synthetic peptide
FYPGSGNI

SEQ ID NO: 503 - protein, 17 aa, Artificial Sequence
  Description of Artificial Sequence: Synthetic peptide
ARHEDNHYYDGNSWFAY

SEQ ID NO: 504 - protein, 6 aa, Artificial Sequence
  Description of Artificial Sequence: Synthetic peptide
GNIHNY

SEQ ID NO: 505 - protein, 3 aa, Artificial Sequence
  Description of Artificial Sequence: Synthetic peptide
NAK

SEQ ID NO: 506 - protein, 9 aa, Artificial Sequence
  Description of Artificial Sequence: Synthetic peptide
QHFWNTPYT

SEQ ID NO: 507 - protein, 124 aa, Artificial Sequence
  Description of Artificial Sequence: Synthetic polypeptide
QVQLQQSGAELVKPGASVKLSCKASGYTFTVYTIHWVKQRSGQGLEWIGWFYPGSGNIKYNEKFKDKATLTADKSSHTVYMELSRLTSEDSAVYFCARHEDNHYYDGNSWFAYWGQGTLVTVSA

SEQ ID NO: 508 - protein, 107 aa, Artificial Sequence
  Description of Artificial Sequence: Synthetic polypeptide
DIQMTQSPASLSASVGQTVTITCRASGNIHNYLAWFQQKQGKSPQLLVYNAKTLADGVPSRFSGSGSGTQYSLKINSLQTEDFGNYYCQHFWNTPYTFGGGTKLEIK

SEQ ID NO: 509 - protein, 454 aa, Artificial Sequence
  Description of Artificial Sequence: Synthetic polypeptide
QVQLQQSGAELVKPGASVKLSCKASGYTFTVYTIHWVKQRSGQGLEWIGWFYPGSGNIKYNEKFKDKATLTADKSSHTVYMELSRLTSEDSAVYFCARHEDNHYYDGNSWFAYWGQGTLVTVSAASTKGPSVFPLAPSSKSTSGGTAALGCLVKDYFPEPVTVSWNSGALTSGVHTFPAVLQSSGLYSLSSVVTVPSSSLGTQTYICNVNHKPSNTKVDKKVEPKSCDKTHTCPPCPAPELLGGPSVFLFPPKPKDTLMISRTPEVTCVVVDVSHEDPEVKFNWYVDGVEVHNAKTKPREEQYNSTYRVVSVLTVLHQDWLNGKEYKCKVSNKALPAPIEKTISKAKGQPREPQVYTLPPSREEMTKNQVSLTCLVKGFYPSDIAVEWESNGQPENNYKTTPPVLDSDGSFFLYSKLTVDKSRWQQGNVFSCSVMHEALHNHYTQKSLSLSPGK

SEQ ID NO: 510 - protein, 214 aa, Artificial Sequence
  Description of Artificial Sequence: Synthetic polypeptide
DIQMTQSPASLSASVGQTVTITCRASGNIHNYLAWFQQKQGKSPQLLVYNAKTLADGVPSRFSGSGSGTQYSLKINSLQTEDFGNYYCQHFWNTPYTFGGGTKLEIKRTVAAPSVFIFPPSDEQLKSGTASVVCLLNNFYPREAKVQWKVDNALQSGNSQESVTEQDSKDSTYSLSSTLTLSKADYEKHKVYACEVTHQGLSSPVTKSFNRGEC

SEQ ID NO: 511 - protein, 5 aa, Artificial Sequence
  Description of Artificial Sequence: Synthetic peptide
IYSIH

SEQ ID NO: 512 - protein, 16 aa, Artificial Sequence
  Description of Artificial Sequence: Synthetic peptide
MIWGGGDTDYNSALKS

SEQ ID NO: 513 - protein, 14 aa, Artificial Sequence
  Description of Artificial Sequence: Synthetic peptide
NPHYYGGTYEYFDV

SEQ ID NO: 514 - protein, 11 aa, Artificial Sequence
  Description of Artificial Sequence: Synthetic peptide
SASQGISNYLN

SEQ ID NO: 515 - protein, 7 aa, Artificial Sequence
  Description of Artificial Sequence: Synthetic peptide
DTSILYS

SEQ ID NO: 516 - protein, 9 aa, Artificial Sequence
  Description of Artificial Sequence: Synthetic peptide
QQYSNLPYT

SEQ ID NO: 517 - protein, 7 aa, Artificial Sequence
  Description of Artificial Sequence: Synthetic peptide
GFSLSIY

SEQ ID NO: 518 - protein, 5 aa, Artificial Sequence
  Description of Artificial Sequence: Synthetic peptide
WGGGD

SEQ ID NO: 519 - protein, 13 aa, Artificial Sequence
  Description of Artificial Sequence: Synthetic peptide
NPHYYGGTYEYFD

SEQ ID NO: 520 - protein, 7 aa, Artificial Sequence
  Description of Artificial Sequence: Synthetic peptide
SQGISNY

SEQ ID NO: 521 - protein, 3 aa, Artificial Sequence
  Description of Artificial Sequence: Synthetic peptide
DTS

SEQ ID NO: 522 - protein, 6 aa, Artificial Sequence
  Description of Artificial Sequence: Synthetic peptide
YSNLPY

SEQ ID NO: 523 - protein, 10 aa, Artificial Sequence
  Description of Artificial Sequence: Synthetic peptide
GFSLSIYSIH

SEQ ID NO: 524 - protein, 9 aa, Artificial Sequence
  Description of Artificial Sequence: Synthetic peptide
MIWGGGDTD

SEQ ID NO: 525 - protein, 14 aa, Artificial Sequence
  Description of Artificial Sequence: Synthetic peptide
NPHYYGGTYEYFDV

SEQ ID NO: 526 - protein, 11 aa, Artificial Sequence
  Description of Artificial Sequence: Synthetic peptide
SASQGISNYLN

SEQ ID NO: 527 - protein, 7 aa, Artificial Sequence
  Description of Artificial Sequence: Synthetic peptide
DTSILYS

SEQ ID NO: 528 - protein, 9 aa, Artificial Sequence
  Description of Artificial Sequence: Synthetic peptide
QQYSNLPYT

SEQ ID NO: 529 - protein, 6 aa, Artificial Sequence
  Description of Artificial Sequence: Synthetic peptide
SIYSIH

SEQ ID NO: 530 - protein, 12 aa, Artificial Sequence
  Description of Artificial Sequence: Synthetic peptide
WLGMIWGGGDTD

SEQ ID NO: 531 - protein, 15 aa, Artificial Sequence
  Description of Artificial Sequence: Synthetic peptide
ARNPHYYGGTYEYFD

SEQ ID NO: 532 - protein, 7 aa, Artificial Sequence
  Description of Artificial Sequence: Synthetic peptide
SNYLNWY

SEQ ID NO: 533 - protein, 10 aa, Artificial Sequence
  Description of Artificial Sequence: Synthetic peptide
LLIYDTSILY

SEQ ID NO: 534 - protein, 8 aa, Artificial Sequence
  Description of Artificial Sequence: Synthetic peptide
QQYSNLPY

SEQ ID NO: 535 - protein, 8 aa, Artificial Sequence
  Description of Artificial Sequence: Synthetic peptide
GFSLSIYS

SEQ ID NO: 536 - protein, 7 aa, Artificial Sequence
  Description of Artificial Sequence: Synthetic peptide
IWGGGDT

SEQ ID NO: 537 - protein, 16 aa, Artificial Sequence
  Description of Artificial Sequence: Synthetic peptide
ARNPHYYGGTYEYFDV

SEQ ID NO: 538 - protein, 6 aa, Artificial Sequence
  Description of Artificial Sequence: Synthetic peptide
QGISNY

SEQ ID NO: 539 - protein, 3 aa, Artificial Sequence
  Description of Artificial Sequence: Synthetic peptide
DTS

SEQ ID NO: 540 - protein, 9 aa, Artificial Sequence
  Description of Artificial Sequence: Synthetic peptide
QQYSNLPYT

SEQ ID NO: 541 - protein, 122 aa, Artificial Sequence
  Description of Artificial Sequence: Synthetic polypeptide
DVQLQESGPGLVAPSQSLSITCTVSGFSLSIYSIHWVRQPPGKGLEWLGMIWGGGDTDYNSALKSRLSISKDNSESQVFLKMNSLQTDDTAMYYCARNPHYYGGTYEYFDVWGTGTTVTVSS

SEQ ID NO: 542 - protein, 107 aa, Artificial Sequence
  Description of Artificial Sequence: Synthetic polypeptide
DIQMTQTTSSLSASLGDRVTISCSASQGISNYLNWYQQKPDGTVKLLIYDTSILYSGVPSRFSGSGSGTDYSLTISNLEPEDVATYYCQQYSNLPYTFGSGTKLEIK

SEQ ID NO: 543 - protein, 452 aa, Artificial Sequence
  Description of Artificial Sequence: Synthetic polypeptide
DVQLQESGPGLVAPSQSLSITCTVSGFSLSIYSIHWVRQPPGKGLEWLGMIWGGGDTDYNSALKSRLSISKDNSESQVFLKMNSLQTDDTAMYYCARNPHYYGGTYEYFDVWGTGTTVTVSSASTKGPSVFPLAPSSKSTSGGTAALGCLVKDYFPEPVTVSWNSGALTSGVHTFPAVLQSSGLYSLSSVVTVPSSSLGTQTYICNVNHKPSNTKVDKKVEPKSCDKTHTCPPCPAPELLGGPSVFLFPPKPKDTLMISRTPEVTCVVVDVSHEDPEVKFNWYVDGVEVHNAKTKPREEQYNSTYRVVSVLTVLHQDWLNGKEYKCKVSNKALPAPIEKTISKAKGQPREPQVYTLPPSREEMTKNQVSLTCLVKGFYPSDIAVEWESNGQPENNYKTTPPVLDSDGSFFLYSKLTVDKSRWQQGNVFSCSVMHEALHNHYTQKSLSLSPGK

SEQ ID NO: 544 - protein, 214 aa, Artificial Sequence
  Description of Artificial Sequence: Synthetic polypeptide
DIQMTQTTSSLSASLGDRVTISCSASQGISNYLNWYQQKPDGTVKLLIYDTSILYSGVPSRFSGSGSGTDYSLTISNLEPEDVATYYCQQYSNLPYTFGSGTKLEIKRTVAAPSVFIFPPSDEQLKSGTASVVCLLNNFYPREAKVQWKVDNALQSGNSQESVTEQDSKDSTYSLSSTLTLSKADYEKHKVYACEVTHQGLSSPVTKSFNRGEC

SEQ ID NO: 545 - protein, 5 aa, Artificial Sequence
  Description of Artificial Sequence: Synthetic peptide
EYTIH

SEQ ID NO: 546 - protein, 17 aa, Artificial Sequence
  Description of Artificial Sequence: Synthetic peptide
WFYPGTGSIKYNEKFKD

SEQ ID NO: 547 - protein, 15 aa, Artificial Sequence
  Description of Artificial Sequence: Synthetic peptide
HEDNHYYDGNSWFAY

SEQ ID NO: 548 - protein, 11 aa, Artificial Sequence
  Description of Artificial Sequence: Synthetic peptide
RASGNIHNYLA

SEQ ID NO: 549 - protein, 7 aa, Artificial Sequence
  Description of Artificial Sequence: Synthetic peptide
NAKTLAD

SEQ ID NO: 550 - protein, 9 aa, Artificial Sequence
  Description of Artificial Sequence: Synthetic peptide
QHFWSTPYT

SEQ ID NO: 551 - protein, 7 aa, Artificial Sequence
  Description of Artificial Sequence: Synthetic peptide
GYTFTEY

SEQ ID NO: 552 - protein, 6 aa, Artificial Sequence
  Description of Artificial Sequence: Synthetic peptide
YPGTGS

SEQ ID NO: 553 - protein, 14 aa, Artificial Sequence
  Description of Artificial Sequence: Synthetic peptide
HEDNHYYDGNSWFA

SEQ ID NO: 554 - protein, 7 aa, Artificial Sequence
  Description of Artificial Sequence: Synthetic peptide
SGNIHNY

SEQ ID NO: 555 - protein, 3 aa, Artificial Sequence
  Description of Artificial Sequence: Synthetic peptide
NAK

SEQ ID NO: 556 - protein, 6 aa, Artificial Sequence
  Description of Artificial Sequence: Synthetic peptide
FWSTPY

SEQ ID NO: 557 - protein, 10 aa, Artificial Sequence
  Description of Artificial Sequence: Synthetic peptide
GYTFTEYTIH

SEQ ID NO: 558 - protein, 10 aa, Artificial Sequence
  Description of Artificial Sequence: Synthetic peptide
WFYPGTGSIK

SEQ ID NO: 559 - protein, 15 aa, Artificial Sequence
  Description of Artificial Sequence: Synthetic peptide
HEDNHYYDGNSWFAY

SEQ ID NO: 560 - protein, 11 aa, Artificial Sequence
  Description of Artificial Sequence: Synthetic peptide
RASGNIHNYLA

SEQ ID NO: 561 - protein, 7 aa, Artificial Sequence
  Description of Artificial Sequence: Synthetic peptide
NAKTLAD

SEQ ID NO: 562 - protein, 9 aa, Artificial Sequence
  Description of Artificial Sequence: Synthetic peptide
QHFWSTPYT

SEQ ID NO: 563 - protein, 6 aa, Artificial Sequence
  Description of Artificial Sequence: Synthetic peptide
TEYTIH

SEQ ID NO: 564 - protein, 13 aa, Artificial Sequence
  Description of Artificial Sequence: Synthetic peptide
WIGWFYPGTGSIK

SEQ ID NO: 565 - protein, 16 aa, Artificial Sequence
  Description of Artificial Sequence: Synthetic peptide
ARHEDNHYYDGNSWFA

SEQ ID NO: 566 - protein, 7 aa, Artificial Sequence
  Description of Artificial Sequence: Synthetic peptide
HNYLAWF

SEQ ID NO: 567 - protein, 10 aa, Artificial Sequence
  Description of Artificial Sequence: Synthetic peptide
LLVYNAKTLA

SEQ ID NO: 568 - protein, 8 aa, Artificial Sequence
  Description of Artificial Sequence: Synthetic peptide
QHFWSTPY

SEQ ID NO: 569 - protein, 8 aa, Artificial Sequence
  Description of Artificial Sequence: Synthetic peptide
GYTFTEYT

SEQ ID NO: 570 - protein, 8 aa, Artificial Sequence
  Description of Artificial Sequence: Synthetic peptide
FYPGTGSI

SEQ ID NO: 571 - protein, 17 aa, Artificial Sequence
  Description of Artificial Sequence: Synthetic peptide
ARHEDNHYYDGNSWFAY

SEQ ID NO: 572 - protein, 6 aa, Artificial Sequence
  Description of Artificial Sequence: Synthetic peptide
GNIHNY

SEQ ID NO: 573 - protein, 3 aa, Artificial Sequence
  Description of Artificial Sequence: Synthetic peptide
NAK

SEQ ID NO: 574 - protein, 9 aa, Artificial Sequence
  Description of Artificial Sequence: Synthetic peptide
QHFWSTPYT

SEQ ID NO: 575 - protein, 124 aa, Artificial Sequence
  Description of Artificial Sequence: Synthetic polypeptide
QVQLQQSGAELVKPGASVKLSCKASGYTFTEYTIHWVKQRSGQGLEWIGWFYPGTGSIKYNEKFKDKATLTADKSSHTVYMELSKLTSEDSAVYFCARHEDNHYYDGNSWFAYWGQGTLVTVSA

SEQ ID NO: 576 - protein, 107 aa, Artificial Sequence
  Description of Artificial Sequence: Synthetic polypeptide
DIQMTQSPASLSASVGETVTITCRASGNIHNYLAWFQQKQGKSPQLLVYNAKTLADGVPSRFSGSGSGTQYSLKINSLQAEDFGSYYCQHFWSTPYTFGSGTKLEIK

SEQ ID NO: 577 - protein, 454 aa, Artificial Sequence
  Description of Artificial Sequence: Synthetic polypeptide
QVQLQQSGAELVKPGASVKLSCKASGYTFTEYTIHWVKQRSGQGLEWIGWFYPGTGSIKYNEKFKDKATLTADKSSHTVYMELSKLTSEDSAVYFCARHEDNHYYDGNSWFAYWGQGTLVTVSAASTKGPSVFPLAPSSKSTSGGTAALGCLVKDYFPEPVTVSWNSGALTSGVHTFPAVLQSSGLYSLSSVVTVPSSSLGTQTYICNVNHKPSNTKVDKKVEPKSCDKTHTCPPCPAPELLGGPSVFLFPPKPKDTLMISRTPEVTCVVVDVSHEDPEVKFNWYVDGVEVHNAKTKPREEQYNSTYRVVSVLTVLHQDWLNGKEYKCKVSNKALPAPIEKTISKAKGQPREPQVYTLPPSREEMTKNQVSLTCLVKGFYPSDIAVEWESNGQPENNYKTTPPVLDSDGSFFLYSKLTVDKSRWQQGNVFSCSVMHEALHNHYTQKSLSLSPGK

SEQ ID NO: 578 - protein, 214 aa, Artificial Sequence
  Description of Artificial Sequence: Synthetic polypeptide
DIQMTQSPASLSASVGETVTITCRASGNIHNYLAWFQQKQGKSPQLLVYNAKTLADGVPSRFSGSGSGTQYSLKINSLQAEDFGSYYCQHFWSTPYTFGSGTKLEIKRTVAAPSVFIFPPSDEQLKSGTASVVCLLNNFYPREAKVQWKVDNALQSGNSQESVTEQDSKDSTYSLSSTLTLSKADYEKHKVYACEVTHQGLSSPVTKSFNRGEC

SEQ ID NO: 579 - protein, 5 aa, Artificial Sequence
  Description of Artificial Sequence: Synthetic peptide
EYTIH

SEQ ID NO: 580 - protein, 17 aa, Artificial Sequence
  Description of Artificial Sequence: Synthetic peptide
WFYPGNGNMRYNEKFKD

SEQ ID NO: 581 - protein, 15 aa, Artificial Sequence
  Description of Artificial Sequence: Synthetic peptide
YEDNHYYDGASWFAY

SEQ ID NO: 582 - protein, 11 aa, Artificial Sequence
  Description of Artificial Sequence: Synthetic peptide
RASGNIHNYLA

SEQ ID NO: 583 - protein, 7 aa, Artificial Sequence
  Description of Artificial Sequence: Synthetic peptide
NAKTLAD

SEQ ID NO: 584 - protein, 9 aa, Artificial Sequence
  Description of Artificial Sequence: Synthetic peptide
QHFWSTPFT

SEQ ID NO: 585 - protein, 7 aa, Artificial Sequence
  Description of Artificial Sequence: Synthetic peptide
GYTFTEY

SEQ ID NO: 586 - protein, 6 aa, Artificial Sequence
  Description of Artificial Sequence: Synthetic peptide
YPGNGN

SEQ ID NO: 587 - protein, 14 aa, Artificial Sequence
  Description of Artificial Sequence: Synthetic peptide
YEDNHYYDGASWFA

SEQ ID NO: 588 - protein, 7 aa, Artificial Sequence
  Description of Artificial Sequence: Synthetic peptide
SGNIHNY

SEQ ID NO: 589 - protein, 3 aa, Artificial Sequence
  Description of Artificial Sequence: Synthetic peptide
NAK

SEQ ID NO: 590 - protein, 6 aa, Artificial Sequence
  Description of Artificial Sequence: Synthetic peptide
FWSTPF

SEQ ID NO: 591 - protein, 10 aa, Artificial Sequence
  Description of Artificial Sequence: Synthetic peptide
GYTFTEYTIH

SEQ ID NO: 592 - protein, 10 aa, Artificial Sequence
  Description of Artificial Sequence: Synthetic peptide
WFYPGNGNMR

SEQ ID NO: 593 - protein, 15 aa, Artificial Sequence
  Description of Artificial Sequence: Synthetic peptide
YEDNHYYDGASWFAY

SEQ ID NO: 594 - protein, 11 aa, Artificial Sequence
  Description of Artificial Sequence: Synthetic peptide
RASGNIHNYLA

SEQ ID NO: 595 - protein, 7 aa, Artificial Sequence
  Description of Artificial Sequence: Synthetic peptide
NAKTLAD

SEQ ID NO: 596 - protein, 9 aa, Artificial Sequence
  Description of Artificial Sequence: Synthetic peptide
QHFWSTPFT

SEQ ID NO: 597 - protein, 6 aa, Artificial Sequence
  Description of Artificial Sequence: Synthetic peptide
TEYTIH

SEQ ID NO: 598 - protein, 13 aa, Artificial Sequence
  Description of Artificial Sequence: Synthetic peptide
WIGWFYPGNGNMR

SEQ ID NO: 599 - protein, 16 aa, Artificial Sequence
  Description of Artificial Sequence: Synthetic peptide
ARYEDNHYYDGASWFA

SEQ ID NO: 600 - protein, 7 aa, Artificial Sequence
  Description of Artificial Sequence: Synthetic peptide
HNYLAWF

SEQ ID NO: 601 - protein, 10 aa, Artificial Sequence
  Description of Artificial Sequence: Synthetic peptide
LLVYNAKTLA

SEQ ID NO: 602 - protein, 8 aa, Artificial Sequence
  Description of Artificial Sequence: Synthetic peptide
QHFWSTPF

SEQ ID NO: 603 - protein, 8 aa, Artificial Sequence
  Description of Artificial Sequence: Synthetic peptide
GYTFTEYT

SEQ ID NO: 604 - protein, 8 aa, Artificial Sequence
  Description of Artificial Sequence: Synthetic peptide
FYPGNGNM

SEQ ID NO: 605 - protein, 17 aa, Artificial Sequence
  Description of Artificial Sequence: Synthetic peptide
ARYEDNHYYDGASWFAY

SEQ ID NO: 606 - protein, 6 aa, Artificial Sequence
  Description of Artificial Sequence: Synthetic peptide
GNIHNY

SEQ ID NO: 607 - protein, 3 aa, Artificial Sequence
  Description of Artificial Sequence: Synthetic peptide
NAK

SEQ ID NO: 608 - protein, 9 aa, Artificial Sequence
  Description of Artificial Sequence: Synthetic peptide
QHFWSTPFT

SEQ ID NO: 609 - protein, 124 aa, Artificial Sequence
  Description of Artificial Sequence: Synthetic polypeptide
QVQLQQSGAELVKPGASVKLSCKASGYTFTEYTIHWVKQKSGQGLEWIGWFYPGNGNMRYNEKFKDKATLTADRSSHTVYMELSRLTSEDSAVYFCARYEDNHYYDGASWFAYWGQGTSVTVSS

SEQ ID NO: 610 - protein, 107 aa, Artificial Sequence
  Description of Artificial Sequence: Synthetic polypeptide
DIQMTQSPASLSASVGDTVTITCRASGNIHNYLAWFQQKQGKSPQLLVYNAKTLADGVPSRFSGSGSGTQFSLKINSLQPEDFGTYYCQHFWSTPFTFGSGTKLEMK

SEQ ID NO: 611 - protein, 454 aa, Artificial Sequence
  Description of Artificial Sequence: Synthetic polypeptide
QVQLQQSGAELVKPGASVKLSCKASGYTFTEYTIHWVKQKSGQGLEWIGWFYPGNGNMRYNEKFKDKATLTADRSSHTVYMELSRLTSEDSAVYFCARYEDNHYYDGASWFAYWGQGTSVTVSSASTKGPSVFPLAPSSKSTSGGTAALGCLVKDYFPEPVTVSWNSGALTSGVHTFPAVLQSSGLYSLSSVVTVPSSSLGTQTYICNVNHKPSNTKVDKKVEPKSCDKTHTCPPCPAPELLGGPSVFLFPPKPKDTLMISRTPEVTCVVVDVSHEDPEVKFNWYVDGVEVHNAKTKPREEQYNSTYRVVSVLTVLHQDWLNGKEYKCKVSNKALPAPIEKTISKAKGQPREPQVYTLPPSREEMTKNQVSLTCLVKGFYPSDIAVEWESNGQPENNYKTTPPVLDSDGSFFLYSKLTVDKSRWQQGNVFSCSVMHEALHNHYTQKSLSLSPGK

SEQ ID NO: 612 - protein, 214 aa, Artificial Sequence
  Description of Artificial Sequence: Synthetic polypeptide
DIQMTQSPASLSASVGDTVTITCRASGNIHNYLAWFQQKQGKSPQLLVYNAKTLADGVPSRFSGSGSGTQFSLKINSLQPEDFGTYYCQHFWSTPFTFGSGTKLEMKRTVAAPSVFIFPPSDEQLKSGTASVVCLLNNFYPREAKVQWKVDNALQSGNSQESVTEQDSKDSTYSLSSTLTLSKADYEKHKVYACEVTHQGLSSPVTKSFNRGEC

SEQ ID NO: 613 - protein, 5 aa, Artificial Sequence
  Description of Artificial Sequence: Synthetic peptide
DDYIY

SEQ ID NO: 614 - protein, 17 aa, Artificial Sequence
  Description of Artificial Sequence: Synthetic peptide
WIDPENGATEYASKFQG

SEQ ID NO: 615 - protein, 9 aa, Artificial Sequence
  Description of Artificial Sequence: Synthetic peptide
HDYGYAMDY

SEQ ID NO: 616 - protein, 12 aa, Artificial Sequence
  Description of Artificial Sequence: Synthetic peptide
TASSSVSSSYLH

SEQ ID NO: 617 - protein, 7 aa, Artificial Sequence
  Description of Artificial Sequence: Synthetic peptide
STSNLAS

SEQ ID NO: 618 - protein, 9 aa, Artificial Sequence
  Description of Artificial Sequence: Synthetic peptide
HQYHRSPLT

SEQ ID NO: 619 - protein, 7 aa, Artificial Sequence
  Description of Artificial Sequence: Synthetic peptide
GFNFKDD

SEQ ID NO: 620 - protein, 6 aa, Artificial Sequence
  Description of Artificial Sequence: Synthetic peptide
DPENGA

SEQ ID NO: 621 - protein, 8 aa, Artificial Sequence
  Description of Artificial Sequence: Synthetic peptide
HDYGYAMD

SEQ ID NO: 622 - protein, 8 aa, Artificial Sequence
  Description of Artificial Sequence: Synthetic peptide
SSSVSSSY

SEQ ID NO: 623 - protein, 3 aa, Artificial Sequence
  Description of Artificial Sequence: Synthetic peptide
STS

SEQ ID NO: 624 - protein, 6 aa, Artificial Sequence
  Description of Artificial Sequence: Synthetic peptide
YHRSPL

SEQ ID NO: 625 - protein, 10 aa, Artificial Sequence
  Description of Artificial Sequence: Synthetic peptide
GFNFKDDYIY

SEQ ID NO: 626 - protein, 10 aa, Artificial Sequence
  Description of Artificial Sequence: Synthetic peptide
WIDPENGATE

SEQ ID NO: 627 - protein, 9 aa, Artificial Sequence
  Description of Artificial Sequence: Synthetic peptide
HDYGYAMDY

SEQ ID NO: 628 - protein, 12 aa, Artificial Sequence
  Description of Artificial Sequence: Synthetic peptide
TASSSVSSSYLH

SEQ ID NO: 629 - protein, 7 aa, Artificial Sequence
  Description of Artificial Sequence: Synthetic peptide
STSNLAS

SEQ ID NO: 630 - protein, 9 aa, Artificial Sequence
  Description of Artificial Sequence: Synthetic peptide
HQYHRSPLT

SEQ ID NO: 631 - protein, 6 aa, Artificial Sequence
  Description of Artificial Sequence: Synthetic peptide
KDDYIY

SEQ ID NO: 632 - protein, 13 aa, Artificial Sequence
  Description of Artificial Sequence: Synthetic peptide
WIGWIDPENGATE

SEQ ID NO: 633 - protein, 10 aa, Artificial Sequence
  Description of Artificial Sequence: Synthetic peptide
SLHDYGYAMD

SEQ ID NO: 634 - protein, 8 aa, Artificial Sequence
  Description of Artificial Sequence: Synthetic peptide
SSSYLHWY

SEQ ID NO: 635 - protein, 10 aa, Artificial Sequence
  Description of Artificial Sequence: Synthetic peptide
LWIYSTSNLA

SEQ ID NO: 636 - protein, 8 aa, Artificial Sequence
  Description of Artificial Sequence: Synthetic peptide
HQYHRSPL

SEQ ID NO: 637 - protein, 8 aa, Artificial Sequence
  Description of Artificial Sequence: Synthetic peptide
GFNFKDDY

SEQ ID NO: 638 - protein, 8 aa, Artificial Sequence
  Description of Artificial Sequence: Synthetic peptide
IDPENGAT

SEQ ID NO: 639 - protein, 11 aa, Artificial Sequence
  Description of Artificial Sequence: Synthetic peptide
SLHDYGYAMDY

SEQ ID NO: 640 - protein, 7 aa, Artificial Sequence
  Description of Artificial Sequence: Synthetic peptide
SSVSSSY

SEQ ID NO: 641 - protein, 3 aa, Artificial Sequence
  Description of Artificial Sequence: Synthetic peptide
STS

SEQ ID NO: 642 - protein, 9 aa, Artificial Sequence
  Description of Artificial Sequence: Synthetic peptide
HQYHRSPLT

SEQ ID NO: 643 - protein, 118 aa, Artificial Sequence
  Description of Artificial Sequence: Synthetic polypeptide
QVQLQQPGAELVKPGASVKLSCTGSGFNFKDDYIYWVKQRPEQGLEWIGWIDPENGATEYASKFQGKATITADTSSNIAYLQLSSLTSEDTAVYYCSLHDYGYAMDYWGQGTSVTVSS

SEQ ID NO: 644 - protein, 108 aa, Artificial Sequence
  Description of Artificial Sequence: Synthetic polypeptide
QIVLTQSPAIMSASLGERVTLTCTASSSVSSSYLHWYQQKPGSSPKLWIYSTSNLASGVPARFSGSGSGTSYSLTISNMEAEDAATYYCHQYHRSPLTFGGGTKLEIK

SEQ ID NO: 645 - protein, 448 aa, Artificial Sequence
  Description of Artificial Sequence: Synthetic polypeptide
QVQLQQPGAELVKPGASVKLSCTGSGFNFKDDYIYWVKQRPEQGLEWIGWIDPENGATEYASKFQGKATITADTSSNIAYLQLSSLTSEDTAVYYCSLHDYGYAMDYWGQGTSVTVSSASTKGPSVFPLAPSSKSTSGGTAALGCLVKDYFPEPVTVSWNSGALTSGVHTFPAVLQSSGLYSLSSVVTVPSSSLGTQTYICNVNHKPSNTKVDKKVEPKSCDKTHTCPPCPAPELLGGPSVFLFPPKPKDTLMISRTPEVTCVVVDVSHEDPEVKFNWYVDGVEVHNAKTKPREEQYNSTYRVVSVLTVLHQDWLNGKEYKCKVSNKALPAPIEKTISKAKGQPREPQVYTLPPSREEMTKNQVSLTCLVKGFYPSDIAVEWESNGQPENNYKTTPPVLDSDGSFFLYSKLTVDKSRWQQGNVFSCSVMHEALHNHYTQKSLSLSPGK

SEQ ID NO: 646 - protein, 215 aa, Artificial Sequence
  Description of Artificial Sequence: Synthetic polypeptide
QIVLTQSPAIMSASLGERVTLTCTASSSVSSSYLHWYQQKPGSSPKLWIYSTSNLASGVPARFSGSGSGTSYSLTISNMEAEDAATYYCHQYHRSPLTFGGGTKLEIKRTVAAPSVFIFPPSDEQLKSGTASVVCLLNNFYPREAKVQWKVDNALQSGNSQESVTEQDSKDSTYSLSSTLTLSKADYEKHKVYACEVTHQGLSSPVTKSFNRGEC

SEQ ID NO: 647 - protein, 5 aa, Artificial Sequence
  Description of Artificial Sequence: Synthetic peptide
IYSIH

SEQ ID NO: 648 - protein, 16 aa, Artificial Sequence
  Description of Artificial Sequence: Synthetic peptide
MIWGGGSTDYNSTLNS

SEQ ID NO: 649 - protein, 14 aa, Artificial Sequence
  Description of Artificial Sequence: Synthetic peptide
NPHHYGGSTGAMDY

SEQ ID NO: 650 - protein, 11 aa, Artificial Sequence
  Description of Artificial Sequence: Synthetic peptide
KASQDIKKYMA

SEQ ID NO: 651 - protein, 7 aa, Artificial Sequence
  Description of Artificial Sequence: Synthetic peptide
YTSSLQP

SEQ ID NO: 652 - protein, 8 aa, Artificial Sequence
  Description of Artificial Sequence: Synthetic peptide
LQYDNLFT

SEQ ID NO: 653 - protein, 7 aa, Artificial Sequence
  Description of Artificial Sequence: Synthetic peptide
GFSLSIY

SEQ ID NO: 654 - protein, 5 aa, Artificial Sequence
  Description of Artificial Sequence: Synthetic peptide
WGGGS

SEQ ID NO: 655 - protein, 13 aa, Artificial Sequence
  Description of Artificial Sequence: Synthetic peptide
NPHHYGGSTGAMD

SEQ ID NO: 656 - protein, 7 aa, Artificial Sequence
  Description of Artificial Sequence: Synthetic peptide
SQDIKKY

SEQ ID NO: 657 - protein, 3 aa, Artificial Sequence
  Description of Artificial Sequence: Synthetic peptide
YTS

SEQ ID NO: 658 - protein, 5 aa, Artificial Sequence
  Description of Artificial Sequence: Synthetic peptide
YDNLF

SEQ ID NO: 659 - protein, 10 aa, Artificial Sequence
  Description of Artificial Sequence: Synthetic peptide
GFSLSIYSIH

SEQ ID NO: 660 - protein, 9 aa, Artificial Sequence
  Description of Artificial Sequence: Synthetic peptide
MIWGGGSTD

SEQ ID NO: 661 - protein, 14 aa, Artificial Sequence
  Description of Artificial Sequence: Synthetic peptide
NPHHYGGSTGAMDY

SEQ ID NO: 662 - protein, 11 aa, Artificial Sequence
  Description of Artificial Sequence: Synthetic peptide
KASQDIKKYMA

SEQ ID NO: 663 - protein, 7 aa, Artificial Sequence
  Description of Artificial Sequence: Synthetic peptide
YTSSLQP

SEQ ID NO: 664 - protein, 8 aa, Artificial Sequence
  Description of Artificial Sequence: Synthetic peptide
LQYDNLFT

SEQ ID NO: 665 - protein, 6 aa, Artificial Sequence
  Description of Artificial Sequence: Synthetic peptide
SIYSIH

SEQ ID NO: 666 - protein, 12 aa, Artificial Sequence
  Description of Artificial Sequence: Synthetic peptide
WLGMIWGGGSTD

SEQ ID NO: 667 - protein, 15 aa, Artificial Sequence
  Description of Artificial Sequence: Synthetic peptide
ARNPHHYGGSTGAMD

SEQ ID NO: 668 - protein, 7 aa, Artificial Sequence
  Description of Artificial Sequence: Synthetic peptide
KKYMAWY

SEQ ID NO: 669 - protein, 10 aa, Artificial Sequence
  Description of Artificial Sequence: Synthetic peptide
LLIHYTSSLQ

SEQ ID NO: 670 - protein, 7 aa, Artificial Sequence
  Description of Artificial Sequence: Synthetic peptide
LQYDNLF

SEQ ID NO: 671 - protein, 8 aa, Artificial Sequence
  Description of Artificial Sequence: Synthetic peptide
GFSLSIYS

SEQ ID NO: 672 - protein, 7 aa, Artificial Sequence
  Description of Artificial Sequence: Synthetic peptide
IWGGGST

SEQ ID NO: 673 - protein, 16 aa, Artificial Sequence
  Description of Artificial Sequence: Synthetic peptide
ARNPHHYGGSTGAMDY

SEQ ID NO: 674 - protein, 6 aa, Artificial Sequence
  Description of Artificial Sequence: Synthetic peptide
QDIKKY

SEQ ID NO: 675 - protein, 3 aa, Artificial Sequence
  Description of Artificial Sequence: Synthetic peptide
YTS

SEQ ID NO: 676 - protein, 8 aa, Artificial Sequence
  Description of Artificial Sequence: Synthetic peptide
LQYDNLFT

SEQ ID NO: 677 - protein, 122 aa, Artificial Sequence
  Description of Artificial Sequence: Synthetic polypeptide
QVQLKESGPGLVAPSQSLSITCTVSGFSLSIYSIHWVRQPPGKGLEWLGMIWGGGSTDYNSTLNSRLSIIKDNSKSQVFLKMNSLQTDDTAMYYCARNPHHYGGSTGAMDYWGQGTTVTVSS

SEQ ID NO: 678 - protein, 106 aa, Artificial Sequence
  Description of Artificial Sequence: Synthetic polypeptide
DVQMIQSPSSLSASLGGTVTITCKASQDIKKYMAWYQHKPGKGPRLLIHYTSSLQPGIPSRFSGSGSGRDYYFSISNLEPEDIATYFCLQYDNLFTFGSGTKLELK

SEQ ID NO: 679 - protein, 452 aa, Artificial Sequence
  Description of Artificial Sequence: Synthetic polypeptide
QVQLKESGPGLVAPSQSLSITCTVSGFSLSIYSIHWVRQPPGKGLEWLGMIWGGGSTDYNSTLNSRLSIIKDNSKSQVFLKMNSLQTDDTAMYYCARNPHHYGGSTGAMDYWGQGTTVTVSSASTKGPSVFPLAPSSKSTSGGTAALGCLVKDYFPEPVTVSWNSGALTSGVHTFPAVLQSSGLYSLSSVVTVPSSSLGTQTYICNVNHKPSNTKVDKKVEPKSCDKTHTCPPCPAPELLGGPSVFLFPPKPKDTLMISRTPEVTCVVVDVSHEDPEVKFNWYVDGVEVHNAKTKPREEQYNSTYRVVSVLTVLHQDWLNGKEYKCKVSNKALPAPIEKTISKAKGQPREPQVYTLPPSREEMTKNQVSLTCLVKGFYPSDIAVEWESNGQPENNYKTTPPVLDSDGSFFLYSKLTVDKSRWQQGNVFSCSVMHEALHNHYTQKSLSLSPGK

SEQ ID NO: 680 - protein, 213 aa, Artificial Sequence
  Description of Artificial Sequence: Synthetic polypeptide
DVQMIQSPSSLSASLGGTVTITCKASQDIKKYMAWYQHKPGKGPRLLIHYTSSLQPGIPSRFSGSGSGRDYYFSISNLEPEDIATYFCLQYDNLFTFGSGTKLELKRTVAAPSVFIFPPSDEQLKSGTASVVCLLNNFYPREAKVQWKVDNALQSGNSQESVTEQDSKDSTYSLSSTLTLSKADYEKHKVYACEVTHQGLSSPVTKSFNRGEC

SEQ ID NO: 681 - protein, 7 aa, Artificial Sequence
  Description of Artificial Sequence: Synthetic peptide
TSGMNVG

SEQ ID NO: 682 - protein, 16 aa, Artificial Sequence
  Description of Artificial Sequence: Synthetic peptide
HIWWDDDKYYNPSLKS

SEQ ID NO: 683 - protein, 11 aa, Artificial Sequence
  Description of Artificial Sequence: Synthetic peptide
RGNYGNYEFAY

SEQ ID NO: 684 - protein, 11 aa, Artificial Sequence
  Description of Artificial Sequence: Synthetic peptide
RASQDIRNYLN

SEQ ID NO: 685 - protein, 7 aa, Artificial Sequence
  Description of Artificial Sequence: Synthetic peptide
HTSRLHS

SEQ ID NO: 686 - protein, 9 aa, Artificial Sequence
  Description of Artificial Sequence: Synthetic peptide
QQGNTLPWT

SEQ ID NO: 687 - protein, 9 aa, Artificial Sequence
  Description of Artificial Sequence: Synthetic peptide
GFSLSTSGM

SEQ ID NO: 688 - protein, 5 aa, Artificial Sequence
  Description of Artificial Sequence: Synthetic peptide
WWDDD

SEQ ID NO: 689 - protein, 10 aa, Artificial Sequence
  Description of Artificial Sequence: Synthetic peptide
RGNYGNYEFA

SEQ ID NO: 690 - protein, 7 aa, Artificial Sequence
  Description of Artificial Sequence: Synthetic peptide
SQDIRNY

SEQ ID NO: 691 - protein, 3 aa, Artificial Sequence
  Description of Artificial Sequence: Synthetic peptide
HTS

SEQ ID NO: 692 - protein, 6 aa, Artificial Sequence
  Description of Artificial Sequence: Synthetic peptide
GNTLPW

SEQ ID NO: 693 - protein, 12 aa, Artificial Sequence
  Description of Artificial Sequence: Synthetic peptide
GFSLSTSGMNVG

SEQ ID NO: 694 - protein, 9 aa, Artificial Sequence
  Description of Artificial Sequence: Synthetic peptide
HIWWDDDKY

SEQ ID NO: 695 - protein, 11 aa, Artificial Sequence
  Description of Artificial Sequence: Synthetic peptide
RGNYGNYEFAY

SEQ ID NO: 696 - protein, 11 aa, Artificial Sequence
  Description of Artificial Sequence: Synthetic peptide
RASQDIRNYLN

SEQ ID NO: 697 - protein, 7 aa, Artificial Sequence
  Description of Artificial Sequence: Synthetic peptide
HTSRLHS

SEQ ID NO: 698 - protein, 9 aa, Artificial Sequence
  Description of Artificial Sequence: Synthetic peptide
QQGNTLPWT

SEQ ID NO: 699 - protein, 8 aa, Artificial Sequence
  Description of Artificial Sequence: Synthetic peptide
STSGMNVG

SEQ ID NO: 700 - protein, 12 aa, Artificial Sequence
  Description of Artificial Sequence: Synthetic peptide
WLAHIWWDDDKY

SEQ ID NO: 701 - protein, 12 aa, Artificial Sequence
  Description of Artificial Sequence: Synthetic peptide
ARRGNYGNYEFA

SEQ ID NO: 702 - protein, 7 aa, Artificial Sequence
  Description of Artificial Sequence: Synthetic peptide
RNYLNWY

SEQ ID NO: 703 - protein, 10 aa, Artificial Sequence
  Description of Artificial Sequence: Synthetic peptide
LLIYHTSRLH

SEQ ID NO: 704 - protein, 8 aa, Artificial Sequence
  Description of Artificial Sequence: Synthetic peptide
QQGNTLPW

SEQ ID NO: 705 - protein, 10 aa, Artificial Sequence
  Description of Artificial Sequence: Synthetic peptide
GFSLSTSGMN

SEQ ID NO: 706 - protein, 7 aa, Artificial Sequence
  Description of Artificial Sequence: Synthetic peptide
IWWDDDK

SEQ ID NO: 707 - protein, 13 aa, Artificial Sequence
  Description of Artificial Sequence: Synthetic peptide
ARRGNYGNYEFAY

SEQ ID NO: 708 - protein, 6 aa, Artificial Sequence
  Description of Artificial Sequence: Synthetic peptide
QDIRNY

SEQ ID NO: 709 - protein, 3 aa, Artificial Sequence
  Description of Artificial Sequence: Synthetic peptide
HTS

SEQ ID NO: 710 - protein, 9 aa, Artificial Sequence
  Description of Artificial Sequence: Synthetic peptide
QQGNTLPWT

SEQ ID NO: 711 - protein, 121 aa, Artificial Sequence
  Description of Artificial Sequence: Synthetic polypeptide
QVTLKESGPGILKPSQTLSLTCSFSGFSLSTSGMNVGWIRQPSGKGLEWLAHIWWDDDKYYNPSLKSQLTISKDTSRNQVFLKITSVDTADTATYYCARRGNYGNYEFAYWGQGTTVTVSS

SEQ ID NO: 712 - protein, 107 aa, Artificial Sequence
  Description of Artificial Sequence: Synthetic polypeptide
DIQMTQTTSSLSASLGDRVTISCRASQDIRNYLNWYQQKPDGTVKLLIYHTSRLHSGVPSRFSGSGSGTDYSLTISNLDQEDIATYFCQQGNTLPWTFGAGTKLELK

SEQ ID NO: 713 - protein, 451 aa, Artificial Sequence
  Description of Artificial Sequence: Synthetic polypeptide
QVTLKESGPGILKPSQTLSLTCSFSGFSLSTSGMNVGWIRQPSGKGLEWLAHIWWDDDKYYNPSLKSQLTISKDTSRNQVFLKITSVDTADTATYYCARRGNYGNYEFAYWGQGTTVTVSSASTKGPSVFPLAPSSKSTSGGTAALGCLVKDYFPEPVTVSWNSGALTSGVHTFPAVLQSSGLYSLSSVVTVPSSSLGTQTYICNVNHKPSNTKVDKKVEPKSCDKTHTCPPCPAPELLGGPSVFLFPPKPKDTLMISRTPEVTCVVVDVSHEDPEVKFNWYVDGVEVHNAKTKPREEQYNSTYRVVSVLTVLHQDWLNGKEYKCKVSNKALPAPIEKTISKAKGQPREPQVYTLPPSREEMTKNQVSLTCLVKGFYPSDIAVEWESNGQPENNYKTTPPVLDSDGSFFLYSKLTVDKSRWQQGNVFSCSVMHEALHNHYTQKSLSLSPGK

SEQ ID NO: 714 - protein, 214 aa, Artificial Sequence
  Description of Artificial Sequence: Synthetic polypeptide
DIQMTQTTSSLSASLGDRVTISCRASQDIRNYLNWYQQKPDGTVKLLIYHTSRLHSGVPSRFSGSGSGTDYSLTISNLDQEDIATYFCQQGNTLPWTFGAGTKLELKRTVAAPSVFIFPPSDEQLKSGTASVVCLLNNFYPREAKVQWKVDNALQSGNSQESVTEQDSKDSTYSLSSTLTLSKADYEKHKVYACEVTHQGLSSPVTKSFNRGEC

SEQ ID NO: 715 - protein, 5 aa, Artificial Sequence
  Description of Artificial Sequence: Synthetic peptide
SFWMH

SEQ ID NO: 716 - protein, 17 aa, Artificial Sequence
  Description of Artificial Sequence: Synthetic peptide
NVDPSDSQTHYNQKFKD

SEQ ID NO: 717 - protein, 12 aa, Artificial Sequence
  Description of Artificial Sequence: Synthetic peptide
STYYRYDGPFTY

SEQ ID NO: 718 - protein, 11 aa, Artificial Sequence
  Description of Artificial Sequence: Synthetic peptide
RASQSINNNLH

SEQ ID NO: 719 - protein, 7 aa, Artificial Sequence
  Description of Artificial Sequence: Synthetic peptide
YTSQSIS

SEQ ID NO: 720 - protein, 9 aa, Artificial Sequence
  Description of Artificial Sequence: Synthetic peptide
QQSNSWPLT

SEQ ID NO: 721 - protein, 7 aa, Artificial Sequence
  Description of Artificial Sequence: Synthetic peptide
GYTFTSF

SEQ ID NO: 722 - protein, 6 aa, Artificial Sequence
  Description of Artificial Sequence: Synthetic peptide
DPSDSQ

SEQ ID NO: 723 - protein, 11 aa, Artificial Sequence
  Description of Artificial Sequence: Synthetic peptide
STYYRYDGPFT

SEQ ID NO: 724 - protein, 7 aa, Artificial Sequence
  Description of Artificial Sequence: Synthetic peptide
SQSINNN

SEQ ID NO: 725 - protein, 3 aa, Artificial Sequence
  Description of Artificial Sequence: Synthetic peptide
YTS

SEQ ID NO: 726 - protein, 6 aa, Artificial Sequence
  Description of Artificial Sequence: Synthetic peptide
SNSWPL

SEQ ID NO: 727 - protein, 10 aa, Artificial Sequence
  Description of Artificial Sequence: Synthetic peptide
GYTFTSFWMH

SEQ ID NO: 728 - protein, 10 aa, Artificial Sequence
  Description of Artificial Sequence: Synthetic peptide
NVDPSDSQTH

SEQ ID NO: 729 - protein, 12 aa, Artificial Sequence
  Description of Artificial Sequence: Synthetic peptide
STYYRYDGPFTY

SEQ ID NO: 730 - protein, 11 aa, Artificial Sequence
  Description of Artificial Sequence: Synthetic peptide
RASQSINNNLH

SEQ ID NO: 731 - protein, 7 aa, Artificial Sequence
  Description of Artificial Sequence: Synthetic peptide
YTSQSIS

SEQ ID NO: 732 - protein, 9 aa, Artificial Sequence
  Description of Artificial Sequence: Synthetic peptide
QQSNSWPLT

SEQ ID NO: 733 - protein, 6 aa, Artificial Sequence
  Description of Artificial Sequence: Synthetic peptide
TSFWMH

SEQ ID NO: 734 - protein, 13 aa, Artificial Sequence
  Description of Artificial Sequence: Synthetic peptide
WIGNVDPSDSQTH

SEQ ID NO: 735 - protein, 13 aa, Artificial Sequence
  Description of Artificial Sequence: Synthetic peptide
ARSTYYRYDGPFT

SEQ ID NO: 736 - protein, 7 aa, Artificial Sequence
  Description of Artificial Sequence: Synthetic peptide
NNNLHWY

SEQ ID NO: 737 - protein, 10 aa, Artificial Sequence
  Description of Artificial Sequence: Synthetic peptide
LLIKYTSQSI

SEQ ID NO: 738 - protein, 8 aa, Artificial Sequence
  Description of Artificial Sequence: Synthetic peptide
QQSNSWPL

SEQ ID NO: 739 - protein, 8 aa, Artificial Sequence
  Description of Artificial Sequence: Synthetic peptide
GYTFTSFW

SEQ ID NO: 740 - protein, 8 aa, Artificial Sequence
  Description of Artificial Sequence: Synthetic peptide
VDPSDSQT

SEQ ID NO: 741 - protein, 14 aa, Artificial Sequence
  Description of Artificial Sequence: Synthetic peptide
ARSTYYRYDGPFTY

SEQ ID NO: 742 - protein, 6 aa, Artificial Sequence
  Description of Artificial Sequence: Synthetic peptide
QSINNN

SEQ ID NO: 743 - protein, 3 aa, Artificial Sequence
  Description of Artificial Sequence: Synthetic peptide
YTS

SEQ ID NO: 744 - protein, 9 aa, Artificial Sequence
  Description of Artificial Sequence: Synthetic peptide
QQSNSWPLT

SEQ ID NO: 745 - protein, 121 aa, Artificial Sequence
  Description of Artificial Sequence: Synthetic polypeptide
QVQLQQPGADLVKPGASVKLSCKASGYTFTSFWMHWVKQRPGQGLEWIGNVDPSDSQTHYNQKFKDKATLTVDKSSNTAYMQLSSLTSEDSAVYYCARSTYYRYDGPFTYWGQGTTVTVSS

SEQ ID NO: 746 - protein, 107 aa, Artificial Sequence
  Description of Artificial Sequence: Synthetic polypeptide
DIVLTQSPATLSVTPGDSVSLSCRASQSINNNLHWYQQKSHESPRLLIKYTSQSISGIPSRFSGSGSGPDFTLSINSVETEDFGMYFCQQSNSWPLTFGGGTKLEIK

SEQ ID NO: 747 - protein, 451 aa, Artificial Sequence
  Description of Artificial Sequence: Synthetic polypeptide
QVQLQQPGADLVKPGASVKLSCKASGYTFTSFWMHWVKQRPGQGLEWIGNVDPSDSQTHYNQKFKDKATLTVDKSSNTAYMQLSSLTSEDSAVYYCARSTYYRYDGPFTYWGQGTTVTVSSASTKGPSVFPLAPSSKSTSGGTAALGCLVKDYFPEPVTVSWNSGALTSGVHTFPAVLQSSGLYSLSSVVTVPSSSLGTQTYICNVNHKPSNTKVDKKVEPKSCDKTHTCPPCPAPELLGGPSVFLFPPKPKDTLMISRTPEVTCVVVDVSHEDPEVKFNWYVDGVEVHNAKTKPREEQYNSTYRVVSVLTVLHQDWLNGKEYKCKVSNKALPAPIEKTISKAKGQPREPQVYTLPPSREEMTKNQVSLTCLVKGFYPSDIAVEWESNGQPENNYKTTPPVLDSDGSFFLYSKLTVDKSRWQQGNVFSCSVMHEALHNHYTQKSLSLSPGK

SEQ ID NO: 748 - protein, 214 aa, Artificial Sequence
  Description of Artificial Sequence: Synthetic polypeptide
DIVLTQSPATLSVTPGDSVSLSCRASQSINNNLHWYQQKSHESPRLLIKYTSQSISGIPSRFSGSGSGPDFTLSINSVETEDFGMYFCQQSNSWPLTFGGGTKLEIKRTVAAPSVFIFPPSDEQLKSGTASVVCLLNNFYPREAKVQWKVDNALQSGNSQESVTEQDSKDSTYSLSSTLTLSKADYEKHKVYACEVTHQGLSSPVTKSFNRGEC

SEQ ID NO: 749 - protein, 5 aa, Artificial Sequence
  Description of Artificial Sequence: Synthetic peptide
SYWMN

SEQ ID NO: 750 - protein, 17 aa, Artificial Sequence
  Description of Artificial Sequence: Synthetic peptide
AVNPSNSYTEYAQKFKD

SEQ ID NO: 751 - protein, 14 aa, Artificial Sequence
  Description of Artificial Sequence: Synthetic peptide
SGLYNTNHLAWFAY

SEQ ID NO: 752 - protein, 11 aa, Artificial Sequence
  Description of Artificial Sequence: Synthetic peptide
RASGNIHNYLA

SEQ ID NO: 753 - protein, 7 aa, Artificial Sequence
  Description of Artificial Sequence: Synthetic peptide
NAETLAD

SEQ ID NO: 754 - protein, 9 aa, Artificial Sequence
  Description of Artificial Sequence: Synthetic peptide
QHFWNNPLT

SEQ ID NO: 755 - protein, 7 aa, Artificial Sequence
  Description of Artificial Sequence: Synthetic peptide
GYTFTSY

SEQ ID NO: 756 - protein, 6 aa, Artificial Sequence
  Description of Artificial Sequence: Synthetic peptide
NPSNSY

SEQ ID NO: 757 - protein, 13 aa, Artificial Sequence
  Description of Artificial Sequence: Synthetic peptide
SGLYNTNHLAWFA

SEQ ID NO: 758 - protein, 7 aa, Artificial Sequence
  Description of Artificial Sequence: Synthetic peptide
SGNIHNY

SEQ ID NO: 759 - protein, 3 aa, Artificial Sequence
  Description of Artificial Sequence: Synthetic peptide
NAE

SEQ ID NO: 760 - protein, 6 aa, Artificial Sequence
  Description of Artificial Sequence: Synthetic peptide
FWNNPL

SEQ ID NO: 761 - protein, 10 aa, Artificial Sequence
  Description of Artificial Sequence: Synthetic peptide
GYTFTSYWMN

SEQ ID NO: 762 - protein, 10 aa, Artificial Sequence
  Description of Artificial Sequence: Synthetic peptide
AVNPSNSYTE

SEQ ID NO: 763 - protein, 14 aa, Artificial Sequence
  Description of Artificial Sequence: Synthetic peptide
SGLYNTNHLAWFAY

SEQ ID NO: 764 - protein, 11 aa, Artificial Sequence
  Description of Artificial Sequence: Synthetic peptide
RASGNIHNYLA

SEQ ID NO: 765 - protein, 7 aa, Artificial Sequence
  Description of Artificial Sequence: Synthetic peptide
NAETLAD

SEQ ID NO: 766 - protein, 9 aa, Artificial Sequence
  Description of Artificial Sequence: Synthetic peptide
QHFWNNPLT

SEQ ID NO: 767 - protein, 6 aa, Artificial Sequence
  Description of Artificial Sequence: Synthetic peptide
TSYWMN

SEQ ID NO: 768 - protein, 13 aa, Artificial Sequence
  Description of Artificial Sequence: Synthetic peptide
WIGAVNPSNSYTE

SEQ ID NO: 769 - protein, 15 aa, Artificial Sequence
  Description of Artificial Sequence: Synthetic peptide
ARSGLYNTNHLAWFA

SEQ ID NO: 770 - protein, 7 aa, Artificial Sequence
  Description of Artificial Sequence: Synthetic peptide
HNYLAWY

SEQ ID NO: 771 - protein, 10 aa, Artificial Sequence
  Description of Artificial Sequence: Synthetic peptide
LLVFNAETLA

SEQ ID NO: 772 - protein, 8 aa, Artificial Sequence
  Description of Artificial Sequence: Synthetic peptide
QHFWNNPL

SEQ ID NO: 773 - protein, 8 aa, Artificial Sequence
  Description of Artificial Sequence: Synthetic peptide
GYTFTSYW

SEQ ID NO: 774 - protein, 8 aa, Artificial Sequence
  Description of Artificial Sequence: Synthetic peptide
VNPSNSYT

SEQ ID NO: 775 - protein, 16 aa, Artificial Sequence
  Description of Artificial Sequence: Synthetic peptide
ARSGLYNTNHLAWFAY

SEQ ID NO: 776 - protein, 6 aa, Artificial Sequence
  Description of Artificial Sequence: Synthetic peptide
GNIHNY

SEQ ID NO: 777 - protein, 3 aa, Artificial Sequence
  Description of Artificial Sequence: Synthetic peptide
NAE

SEQ ID NO: 778 - protein, 9 aa, Artificial Sequence
  Description of Artificial Sequence: Synthetic peptide
QHFWNNPLT

SEQ ID NO: 779 - protein, 123 aa, Artificial Sequence
  Description of Artificial Sequence: Synthetic polypeptide
QVQLQQPGAELAKPGTSVKMSCKASGYTFTSYWMNWIKQRPGQGLEWIGAVNPSNSYTEYAQKFKDKAILTADKSSSTAYMSLSGLTSEASAVYYCARSGLYNTNHLAWFAYWGQGTLVTVSA

SEQ ID NO: 780 - protein, 107 aa, Artificial Sequence
  Description of Artificial Sequence: Synthetic polypeptide
DIQMTQSPASLSASVGETVTITCRASGNIHNYLAWYQQKQGKSPQLLVFNAETLADGVPSRFSGSGSGTQFSLKINSLQPEDFGTYYCQHFWNNPLTLGAGTKLELK

SEQ ID NO: 781 - protein, 453 aa, Artificial Sequence
  Description of Artificial Sequence: Synthetic polypeptide
QVQLQQPGAELAKPGTSVKMSCKASGYTFTSYWMNWIKQRPGQGLEWIGAVNPSNSYTEYAQKFKDKAILTADKSSSTAYMSLSGLTSEASAVYYCARSGLYNTNHLAWFAYWGQGTLVTVSAASTKGPSVFPLAPSSKSTSGGTAALGCLVKDYFPEPVTVSWNSGALTSGVHTFPAVLQSSGLYSLSSVVTVPSSSLGTQTYICNVNHKPSNTKVDKKVEPKSCDKTHTCPPCPAPELLGGPSVFLFPPKPKDTLMISRTPEVTCVVVDVSHEDPEVKFNWYVDGVEVHNAKTKPREEQYNSTYRVVSVLTVLHQDWLNGKEYKCKVSNKALPAPIEKTISKAKGQPREPQVYTLPPSREEMTKNQVSLTCLVKGFYPSDIAVEWESNGQPENNYKTTPPVLDSDGSFFLYSKLTVDKSRWQQGNVFSCSVMHEALHNHYTQKSLSLSPGK

SEQ ID NO: 782 - protein, 214 aa, Artificial Sequence
  Description of Artificial Sequence: Synthetic polypeptide
DIQMTQSPASLSASVGETVTITCRASGNIHNYLAWYQQKQGKSPQLLVFNAETLADGVPSRFSGSGSGTQFSLKINSLQPEDFGTYYCQHFWNNPLTLGAGTKLELKRTVAAPSVFIFPPSDEQLKSGTASVVCLLNNFYPREAKVQWKVDNALQSGNSQESVTEQDSKDSTYSLSSTLTLSKADYEKHKVYACEVTHQGLSSPVTKSFNRGEC

SEQ ID NO: 783 - protein, 5 aa, Artificial Sequence
  Description of Artificial Sequence: Synthetic peptide
AYWIN

SEQ ID NO: 784 - protein, 17 aa, Artificial Sequence
  Description of Artificial Sequence: Synthetic peptide
SINPSNGYTEYSQKFKD

SEQ ID NO: 785 - protein, 14 aa, Artificial Sequence
  Description of Artificial Sequence: Synthetic peptide
SGLYYTNHLAWCPY

SEQ ID NO: 786 - protein, 11 aa, Artificial Sequence
  Description of Artificial Sequence: Synthetic peptide
RASGNIHNYLA

SEQ ID NO: 787 - protein, 7 aa, Artificial Sequence
  Description of Artificial Sequence: Synthetic peptide
NAETLAD

SEQ ID NO: 788 - protein, 9 aa, Artificial Sequence
  Description of Artificial Sequence: Synthetic peptide
QHFWNSPLT

SEQ ID NO: 789 - protein, 7 aa, Artificial Sequence
  Description of Artificial Sequence: Synthetic peptide
GYTFAAY

SEQ ID NO: 790 - protein, 6 aa, Artificial Sequence
  Description of Artificial Sequence: Synthetic peptide
NPSNGY

SEQ ID NO: 791 - protein, 13 aa, Artificial Sequence
  Description of Artificial Sequence: Synthetic peptide
SGLYYTNHLAWCP

SEQ ID NO: 792 - protein, 7 aa, Artificial Sequence
  Description of Artificial Sequence: Synthetic peptide
SGNIHNY

SEQ ID NO: 793 - protein, 3 aa, Artificial Sequence
  Description of Artificial Sequence: Synthetic peptide
NAE

SEQ ID NO: 794 - protein, 6 aa, Artificial Sequence
  Description of Artificial Sequence: Synthetic peptide
FWNSPL

SEQ ID NO: 795 - protein, 10 aa, Artificial Sequence
  Description of Artificial Sequence: Synthetic peptide
GYTFAAYWIN

SEQ ID NO: 796 - protein, 10 aa, Artificial Sequence
  Description of Artificial Sequence: Synthetic peptide
SINPSNGYTE

SEQ ID NO: 797 - protein, 14 aa, Artificial Sequence
  Description of Artificial Sequence: Synthetic peptide
SGLYYTNHLAWCPY

SEQ ID NO: 798 - protein, 11 aa, Artificial Sequence
  Description of Artificial Sequence: Synthetic peptide
RASGNIHNYLA

SEQ ID NO: 799 - protein, 7 aa, Artificial Sequence
  Description of Artificial Sequence: Synthetic peptide
NAETLAD

SEQ ID NO: 800 - protein, 9 aa, Artificial Sequence
  Description of Artificial Sequence: Synthetic peptide
QHFWNSPLT

SEQ ID NO: 801 - protein, 6 aa, Artificial Sequence
  Description of Artificial Sequence: Synthetic peptide
AAYWIN

SEQ ID NO: 802 - protein, 13 aa, Artificial Sequence
  Description of Artificial Sequence: Synthetic peptide
WIGSINPSNGYTE

SEQ ID NO: 803 - protein, 15 aa, Artificial Sequence
  Description of Artificial Sequence: Synthetic peptide
SRSGLYYTNHLAWCP

SEQ ID NO: 804 - protein, 7 aa, Artificial Sequence
  Description of Artificial Sequence: Synthetic peptide
HNYLAWY

SEQ ID NO: 805 - protein, 10 aa, Artificial Sequence
  Description of Artificial Sequence: Synthetic peptide
VLVYNAETLA

SEQ ID NO: 806 - protein, 8 aa, Artificial Sequence
  Description of Artificial Sequence: Synthetic peptide
QHFWNSPL

SEQ ID NO: 807 - protein, 8 aa, Artificial Sequence
  Description of Artificial Sequence: Synthetic peptide
GYTFAAYW

SEQ ID NO: 808 - protein, 8 aa, Artificial Sequence
  Description of Artificial Sequence: Synthetic peptide
INPSNGYT

SEQ ID NO: 809 - protein, 16 aa, Artificial Sequence
  Description of Artificial Sequence: Synthetic peptide
SRSGLYYTNHLAWCPY

SEQ ID NO: 810 - protein, 6 aa, Artificial Sequence
  Description of Artificial Sequence: Synthetic peptide
GNIHNY

SEQ ID NO: 811 - protein, 3 aa, Artificial Sequence
  Description of Artificial Sequence: Synthetic peptide
NAE

SEQ ID NO: 812 - protein, 9 aa, Artificial Sequence
  Description of Artificial Sequence: Synthetic peptide
QHFWNSPLT

SEQ ID NO: 813 - protein, 123 aa, Artificial Sequence
  Description of Artificial Sequence: Synthetic polypeptide
EVQLQQSGAELAKPGTSVKMSCKASGYTFAAYWINWLKQRPGQGLEWIGSINPSNGYTEYSQKFKDKAILTADKSSSTAYMQLSSLTSEDSAVYYCSRSGLYYTNHLAWCPYWGQGTTVTVSS

SEQ ID NO: 814 - protein, 107 aa, Artificial Sequence
  Description of Artificial Sequence: Synthetic polypeptide
DIVMTQSPASLSASVGETVTITCRASGNIHNYLAWYQQKQGKSPQVLVYNAETLADSVPSRFSGSGSGTQFSLKINSLQPEDFGNYYCQHFWNSPLTFGGGTKLEIK

SEQ ID NO: 815 - protein, 453 aa, Artificial Sequence
  Description of Artificial Sequence: Synthetic polypeptide
EVQLQQSGAELAKPGTSVKMSCKASGYTFAAYWINWLKQRPGQGLEWIGSINPSNGYTEYSQKFKDKAILTADKSSSTAYMQLSSLTSEDSAVYYCSRSGLYYTNHLAWCPYWGQGTTVTVSSASTKGPSVFPLAPSSKSTSGGTAALGCLVKDYFPEPVTVSWNSGALTSGVHTFPAVLQSSGLYSLSSVVTVPSSSLGTQTYICNVNHKPSNTKVDKKVEPKSCDKTHTCPPCPAPELLGGPSVFLFPPKPKDTLMISRTPEVTCVVVDVSHEDPEVKFNWYVDGVEVHNAKTKPREEQYNSTYRVVSVLTVLHQDWLNGKEYKCKVSNKALPAPIEKTISKAKGQPREPQVYTLPPSREEMTKNQVSLTCLVKGFYPSDIAVEWESNGQPENNYKTTPPVLDSDGSFFLYSKLTVDKSRWQQGNVFSCSVMHEALHNHYTQKSLSLSPGK

SEQ ID NO: 816 - protein, 214 aa, Artificial Sequence
  Description of Artificial Sequence: Synthetic polypeptide
DIVMTQSPASLSASVGETVTITCRASGNIHNYLAWYQQKQGKSPQVLVYNAETLADSVPSRFSGSGSGTQFSLKINSLQPEDFGNYYCQHFWNSPLTFGGGTKLEIKRTVAAPSVFIFPPSDEQLKSGTASVVCLLNNFYPREAKVQWKVDNALQSGNSQESVTEQDSKDSTYSLSSTLTLSKADYEKHKVYACEVTHQGLSSPVTKSFNRGEC

SEQ ID NO: 817 - protein, 6 aa, Artificial Sequence
  Description of Artificial Sequence: Synthetic peptide
SGYYWN

SEQ ID NO: 818 - protein, 16 aa, Artificial Sequence
  Description of Artificial Sequence: Synthetic peptide
YISYDGSNNYNPSLKN

SEQ ID NO: 819 - protein, 8 aa, Artificial Sequence
  Description of Artificial Sequence: Synthetic peptide
NHGDAMDY

SEQ ID NO: 820 - protein, 11 aa, Artificial Sequence
  Description of Artificial Sequence: Synthetic peptide
KASQNVGTAVA

SEQ ID NO: 821 - protein, 7 aa, Artificial Sequence
  Description of Artificial Sequence: Synthetic peptide
SASYRYT

SEQ ID NO: 822 - protein, 8 aa, Artificial Sequence
  Description of Artificial Sequence: Synthetic peptide
QQYSSYLT

SEQ ID NO: 823 - protein, 8 aa, Artificial Sequence
  Description of Artificial Sequence: Synthetic peptide
GYSITSGY

SEQ ID NO: 824 - protein, 5 aa, Artificial Sequence
  Description of Artificial Sequence: Synthetic peptide
SYDGS

SEQ ID NO: 825 - protein, 7 aa, Artificial Sequence
  Description of Artificial Sequence: Synthetic peptide
NHGDAMD

SEQ ID NO: 826 - protein, 7 aa, Artificial Sequence
  Description of Artificial Sequence: Synthetic peptide
SQNVGTA

SEQ ID NO: 827 - protein, 3 aa, Artificial Sequence
  Description of Artificial Sequence: Synthetic peptide
SAS

SEQ ID NO: 828 - protein, 5 aa, Artificial Sequence
  Description of Artificial Sequence: Synthetic peptide
YSSYL

SEQ ID NO: 829 - protein, 11 aa, Artificial Sequence
  Description of Artificial Sequence: Synthetic peptide
GYSITSGYYWN

SEQ ID NO: 830 - protein, 9 aa, Artificial Sequence
  Description of Artificial Sequence: Synthetic peptide
YISYDGSNN

SEQ ID NO: 831 - protein, 8 aa, Artificial Sequence
  Description of Artificial Sequence: Synthetic peptide
NHGDAMDY

SEQ ID NO: 832 - protein, 11 aa, Artificial Sequence
  Description of Artificial Sequence: Synthetic peptide
KASQNVGTAVA

SEQ ID NO: 833 - protein, 7 aa, Artificial Sequence
  Description of Artificial Sequence: Synthetic peptide
SASYRYT

SEQ ID NO: 834 - protein, 8 aa, Artificial Sequence
  Description of Artificial Sequence: Synthetic peptide
QQYSSYLT

SEQ ID NO: 835 - protein, 7 aa, Artificial Sequence
  Description of Artificial Sequence: Synthetic peptide
TSGYYWN

SEQ ID NO: 836 - protein, 12 aa, Artificial Sequence
  Description of Artificial Sequence: Synthetic peptide
WMGYISYDGSNN

SEQ ID NO: 837 - protein, 9 aa, Artificial Sequence
  Description of Artificial Sequence: Synthetic peptide
VRNHGDAMD

SEQ ID NO: 838 - protein, 7 aa, Artificial Sequence
  Description of Artificial Sequence: Synthetic peptide
GTAVAWY

SEQ ID NO: 839 - protein, 10 aa, Artificial Sequence
  Description of Artificial Sequence: Synthetic peptide
LLIYSASYRY

SEQ ID NO: 840 - protein, 7 aa, Artificial Sequence
  Description of Artificial Sequence: Synthetic peptide
QQYSSYL

SEQ ID NO: 841 - protein, 9 aa, Artificial Sequence
  Description of Artificial Sequence: Synthetic peptide
GYSITSGYY

SEQ ID NO: 842 - protein, 7 aa, Artificial Sequence
  Description of Artificial Sequence: Synthetic peptide
ISYDGSN

SEQ ID NO: 843 - protein, 10 aa, Artificial Sequence
  Description of Artificial Sequence: Synthetic peptide
VRNHGDAMDY

SEQ ID NO: 844 - protein, 6 aa, Artificial Sequence
  Description of Artificial Sequence: Synthetic peptide
QNVGTA

SEQ ID NO: 845 - protein, 3 aa, Artificial Sequence
  Description of Artificial Sequence: Synthetic peptide
SAS

SEQ ID NO: 846 - protein, 8 aa, Artificial Sequence
  Description of Artificial Sequence: Synthetic peptide
QQYSSYLT

SEQ ID NO: 847 - protein, 117 aa, Artificial Sequence
  Description of Artificial Sequence: Synthetic polypeptide
DVQLQESGPGLVKPSQSLSLTCSVTGYSITSGYYWNWIRQFPGNKLEWMGYISYDGSNNYNPSLKNRISITRDTSKNQFFLKLNSVTTEDTATYYCVRNHGDAMDYWGQGTSVTVSS

SEQ ID NO: 848 - protein, 106 aa, Artificial Sequence
  Description of Artificial Sequence: Synthetic polypeptide
DIVLTQSQKFMSTTVGDRVSITCKASQNVGTAVAWYQQKPGQSPKLLIYSASYRYTGVPDRFTGSGSGTHFTLTISNMQSEDLADYFCQQYSSYLTFGSGTKLEIK

SEQ ID NO: 849 - protein, 447 aa, Artificial Sequence
  Description of Artificial Sequence: Synthetic polypeptide
DVQLQESGPGLVKPSQSLSLTCSVTGYSITSGYYWNWIRQFPGNKLEWMGYISYDGSNNYNPSLKNRISITRDTSKNQFFLKLNSVTTEDTATYYCVRNHGDAMDYWGQGTSVTVSSASTKGPSVFPLAPSSKSTSGGTAALGCLVKDYFPEPVTVSWNSGALTSGVHTFPAVLQSSGLYSLSSVVTVPSSSLGTQTYICNVNHKPSNTKVDKKVEPKSCDKTHTCPPCPAPELLGGPSVFLFPPKPKDTLMISRTPEVTCVVVDVSHEDPEVKFNWYVDGVEVHNAKTKPREEQYNSTYRVVSVLTVLHQDWLNGKEYKCKVSNKALPAPIEKTISKAKGQPREPQVYTLPPSREEMTKNQVSLTCLVKGFYPSDIAVEWESNGQPENNYKTTPPVLDSDGSFFLYSKLTVDKSRWQQGNVFSCSVMHEALHNHYTQKSLSLSPGK

SEQ ID NO: 850 - protein, 213 aa, Artificial Sequence
  Description of Artificial Sequence: Synthetic polypeptide
DIVLTQSQKFMSTTVGDRVSITCKASQNVGTAVAWYQQKPGQSPKLLIYSASYRYTGVPDRFTGSGSGTHFTLTISNMQSEDLADYFCQQYSSYLTFGSGTKLEIKRTVAAPSVFIFPPSDEQLKSGTASVVCLLNNFYPREAKVQWKVDNALQSGNSQESVTEQDSKDSTYSLSSTLTLSKADYEKHKVYACEVTHQGLSSPVTKSFNRGEC

SEQ ID NO: 851 - protein, 5 aa, Artificial Sequence
  Description of Artificial Sequence: Synthetic peptide
NTYIS

SEQ ID NO: 852 - protein, 17 aa, Artificial Sequence
  Description of Artificial Sequence: Synthetic peptide
WIYTGTGGTWYNQKFTD

SEQ ID NO: 853 - protein, 9 aa, Artificial Sequence
  Description of Artificial Sequence: Synthetic peptide
TNWDWYFDV

SEQ ID NO: 854 - protein, 11 aa, Artificial Sequence
  Description of Artificial Sequence: Synthetic peptide
RASENIYSYLA

SEQ ID NO: 855 - protein, 7 aa, Artificial Sequence
  Description of Artificial Sequence: Synthetic peptide
YAKTLTD

SEQ ID NO: 856 - protein, 9 aa, Artificial Sequence
  Description of Artificial Sequence: Synthetic peptide
QHHYGRPYT

SEQ ID NO: 857 - protein, 7 aa, Artificial Sequence
  Description of Artificial Sequence: Synthetic peptide
GFTFTNT

SEQ ID NO: 858 - protein, 6 aa, Artificial Sequence
  Description of Artificial Sequence: Synthetic peptide
YTGTGG

SEQ ID NO: 859 - protein, 8 aa, Artificial Sequence
  Description of Artificial Sequence: Synthetic peptide
TNWDWYFD

SEQ ID NO: 860 - protein, 7 aa, Artificial Sequence
  Description of Artificial Sequence: Synthetic peptide
SENIYSY

SEQ ID NO: 861 - protein, 3 aa, Artificial Sequence
  Description of Artificial Sequence: Synthetic peptide
YAK

SEQ ID NO: 862 - protein, 6 aa, Artificial Sequence
  Description of Artificial Sequence: Synthetic peptide
HYGRPY

SEQ ID NO: 863 - protein, 10 aa, Artificial Sequence
  Description of Artificial Sequence: Synthetic peptide
GFTFTNTYIS

SEQ ID NO: 864 - protein, 10 aa, Artificial Sequence
  Description of Artificial Sequence: Synthetic peptide
WIYTGTGGTW

SEQ ID NO: 865 - protein, 9 aa, Artificial Sequence
  Description of Artificial Sequence: Synthetic peptide
TNWDWYFDV

SEQ ID NO: 866 - protein, 11 aa, Artificial Sequence
  Description of Artificial Sequence: Synthetic peptide
RASENIYSYLA

SEQ ID NO: 867 - protein, 7 aa, Artificial Sequence
  Description of Artificial Sequence: Synthetic peptide
YAKTLTD

SEQ ID NO: 868 - protein, 9 aa, Artificial Sequence
  Description of Artificial Sequence: Synthetic peptide
QHHYGRPYT

SEQ ID NO: 869 - protein, 6 aa, Artificial Sequence
  Description of Artificial Sequence: Synthetic peptide
TNTYIS

SEQ ID NO: 870 - protein, 13 aa, Artificial Sequence
  Description of Artificial Sequence: Synthetic peptide
WIAWIYTGTGGTW

SEQ ID NO: 871 - protein, 10 aa, Artificial Sequence
  Description of Artificial Sequence: Synthetic peptide
ARTNWDWYFD

SEQ ID NO: 872 - protein, 7 aa, Artificial Sequence
  Description of Artificial Sequence: Synthetic peptide
YSYLAWY

SEQ ID NO: 873 - protein, 10 aa, Artificial Sequence
  Description of Artificial Sequence: Synthetic peptide
LLVYYAKTLT

SEQ ID NO: 874 - protein, 8 aa, Artificial Sequence
  Description of Artificial Sequence: Synthetic peptide
QHHYGRPY

SEQ ID NO: 875 - protein, 8 aa, Artificial Sequence
  Description of Artificial Sequence: Synthetic peptide
GFTFTNTY

SEQ ID NO: 876 - protein, 8 aa, Artificial Sequence
  Description of Artificial Sequence: Synthetic peptide
IYTGTGGT

SEQ ID NO: 877 - protein, 11 aa, Artificial Sequence
  Description of Artificial Sequence: Synthetic peptide
ARTNWDWYFDV

SEQ ID NO: 878 - protein, 6 aa, Artificial Sequence
  Description of Artificial Sequence: Synthetic peptide
ENIYSY

SEQ ID NO: 879 - protein, 3 aa, Artificial Sequence
  Description of Artificial Sequence: Synthetic peptide
YAK

SEQ ID NO: 880 - protein, 9 aa, Artificial Sequence
  Description of Artificial Sequence: Synthetic peptide
QHHYGRPYT

SEQ ID NO: 881 - protein, 118 aa, Artificial Sequence
  Description of Artificial Sequence: Synthetic polypeptide
QVQLQQSGAELVKPGASVKLSCKTSGFTFTNTYISWLKQKPRQSLEWIAWIYTGTGGTWYNQKFTDKAQLTVDTSSSTAYMQVSSLTSEDSAIYYCARTNWDWYFDVWGAGTSVTVSS

SEQ ID NO: 882 - protein, 107 aa, Artificial Sequence
  Description of Artificial Sequence: Synthetic polypeptide
DIVMTQSPASLSASVGETVTITCRASENIYSYLAWYQQKQGKSPQLLVYYAKTLTDGVPSRFSGSGSGTQFSLKINSLQPEDFGSYYCQHHYGRPYTFGSGTKLEIK

SEQ ID NO: 883 - protein, 448 aa, Artificial Sequence
  Description of Artificial Sequence: Synthetic polypeptide
QVQLQQSGAELVKPGASVKLSCKTSGFTFTNTYISWLKQKPRQSLEWIAWIYTGTGGTWYNQKFTDKAQLTVDTSSSTAYMQVSSLTSEDSAIYYCARTNWDWYFDVWGAGTSVTVSSASTKGPSVFPLAPSSKSTSGGTAALGCLVKDYFPEPVTVSWNSGALTSGVHTFPAVLQSSGLYSLSSVVTVPSSSLGTQTYICNVNHKPSNTKVDKKVEPKSCDKTHTCPPCPAPELLGGPSVFLFPPKPKDTLMISRTPEVTCVVVDVSHEDPEVKFNWYVDGVEVHNAKTKPREEQYNSTYRVVSVLTVLHQDWLNGKEYKCKVSNKALPAPIEKTISKAKGQPREPQVYTLPPSREEMTKNQVSLTCLVKGFYPSDIAVEWESNGQPENNYKTTPPVLDSDGSFFLYSKLTVDKSRWQQGNVFSCSVMHEALHNHYTQKSLSLSPGK

SEQ ID NO: 884 - protein, 214 aa, Artificial Sequence
  Description of Artificial Sequence: Synthetic polypeptide
DIVMTQSPASLSASVGETVTITCRASENIYSYLAWYQQKQGKSPQLLVYYAKTLTDGVPSRFSGSGSGTQFSLKINSLQPEDFGSYYCQHHYGRPYTFGSGTKLEIKRTVAAPSVFIFPPSDEQLKSGTASVVCLLNNFYPREAKVQWKVDNALQSGNSQESVTEQDSKDSTYSLSSTLTLSKADYEKHKVYACEVTHQGLSSPVTKSFNRGEC

SEQ ID NO: 885 - protein, 5 aa, Artificial Sequence
  Description of Artificial Sequence: Synthetic peptide
DYYMA

SEQ ID NO: 886 - protein, 17 aa, Artificial Sequence
  Description of Artificial Sequence: Synthetic peptide
HINYDGSITYYLDSLKS

SEQ ID NO: 887 - protein, 10 aa, Artificial Sequence
  Description of Artificial Sequence: Synthetic peptide
EDYSNYGFAY

SEQ ID NO: 888 - protein, 11 aa, Artificial Sequence
  Description of Artificial Sequence: Synthetic peptide
HASQNINVWLS

SEQ ID NO: 889 - protein, 7 aa, Artificial Sequence
  Description of Artificial Sequence: Synthetic peptide
KASNLHT

SEQ ID NO: 890 - protein, 9 aa, Artificial Sequence
  Description of Artificial Sequence: Synthetic peptide
QQGQSYPLT

SEQ ID NO: 891 - protein, 7 aa, Artificial Sequence
  Description of Artificial Sequence: Synthetic peptide
GFTFSDY

SEQ ID NO: 892 - protein, 6 aa, Artificial Sequence
  Description of Artificial Sequence: Synthetic peptide
NYDGSI

SEQ ID NO: 893 - protein, 9 aa, Artificial Sequence
  Description of Artificial Sequence: Synthetic peptide
EDYSNYGFA

SEQ ID NO: 894 - protein, 7 aa, Artificial Sequence
  Description of Artificial Sequence: Synthetic peptide
SQNINVW

SEQ ID NO: 895 - protein, 3 aa, Artificial Sequence
  Description of Artificial Sequence: Synthetic peptide
KAS

SEQ ID NO: 896 - protein, 6 aa, Artificial Sequence
  Description of Artificial Sequence: Synthetic peptide
GQSYPL

SEQ ID NO: 897 - protein, 10 aa, Artificial Sequence
  Description of Artificial Sequence: Synthetic peptide
GFTFSDYYMA

SEQ ID NO: 898 - protein, 10 aa, Artificial Sequence
  Description of Artificial Sequence: Synthetic peptide
HINYDGSITY

SEQ ID NO: 899 - protein, 10 aa, Artificial Sequence
  Description of Artificial Sequence: Synthetic peptide
EDYSNYGFAY

SEQ ID NO: 900 - protein, 11 aa, Artificial Sequence
  Description of Artificial Sequence: Synthetic peptide
HASQNINVWLS

SEQ ID NO: 901 - protein, 7 aa, Artificial Sequence
  Description of Artificial Sequence: Synthetic peptide
KASNLHT

SEQ ID NO: 902 - protein, 9 aa, Artificial Sequence
  Description of Artificial Sequence: Synthetic peptide
QQGQSYPLT

SEQ ID NO: 903 - protein, 6 aa, Artificial Sequence
  Description of Artificial Sequence: Synthetic peptide
SDYYMA

SEQ ID NO: 904 - protein, 13 aa, Artificial Sequence
  Description of Artificial Sequence: Synthetic peptide
WVAHINYDGSITY

SEQ ID NO: 905 - protein, 11 aa, Artificial Sequence
  Description of Artificial Sequence: Synthetic peptide
AREDYSNYGFA

SEQ ID NO: 906 - protein, 7 aa, Artificial Sequence
  Description of Artificial Sequence: Synthetic peptide
NVWLSWY

SEQ ID NO: 907 - protein, 10 aa, Artificial Sequence
  Description of Artificial Sequence: Synthetic peptide
LLIYKASNLH

SEQ ID NO: 908 - protein, 8 aa, Artificial Sequence
  Description of Artificial Sequence: Synthetic peptide
QQGQSYPL

SEQ ID NO: 909 - protein, 8 aa, Artificial Sequence
  Description of Artificial Sequence: Synthetic peptide
GFTFSDYY

SEQ ID NO: 910 - protein, 8 aa, Artificial Sequence
  Description of Artificial Sequence: Synthetic peptide
INYDGSIT

SEQ ID NO: 911 - protein, 12 aa, Artificial Sequence
  Description of Artificial Sequence: Synthetic peptide
AREDYSNYGFAY

SEQ ID NO: 912 - protein, 6 aa, Artificial Sequence
  Description of Artificial Sequence: Synthetic peptide
QNINVW

SEQ ID NO: 913 - protein, 3 aa, Artificial Sequence
  Description of Artificial Sequence: Synthetic peptide
KAS

SEQ ID NO: 914 - protein, 9 aa, Artificial Sequence
  Description of Artificial Sequence: Synthetic peptide
QQGQSYPLT

SEQ ID NO: 915 - protein, 119 aa, Artificial Sequence
  Description of Artificial Sequence: Synthetic polypeptide
EVKLVESGGGLVQPGSSMKLSCTASGFTFSDYYMAWVRQVPEKGLEWVAHINYDGSITYYLDSLKSRFIISRDNAKNILYLQMSSLKSEDTATYYCAREDYSNYGFAYWGQGTLVTVSA

SEQ ID NO: 916 - protein, 107 aa, Artificial Sequence
  Description of Artificial Sequence: Synthetic polypeptide
NTQMNQTPSSLSASLGDTITITCHASQNINVWLSWYQQKPGNIPKLLIYKASNLHTGVPSRFSGSGSGTGFTLTISSLQPEDIATYYCQQGQSYPLTFGSGTKLEMK

SEQ ID NO: 917 - protein, 449 aa, Artificial Sequence
  Description of Artificial Sequence: Synthetic polypeptide
EVKLVESGGGLVQPGSSMKLSCTASGFTFSDYYMAWVRQVPEKGLEWVAHINYDGSITYYLDSLKSRFIISRDNAKNILYLQMSSLKSEDTATYYCAREDYSNYGFAYWGQGTLVTVSAASTKGPSVFPLAPSSKSTSGGTAALGCLVKDYFPEPVTVSWNSGALTSGVHTFPAVLQSSGLYSLSSVVTVPSSSLGTQTYICNVNHKPSNTKVDKKVEPKSCDKTHTCPPCPAPELLGGPSVFLFPPKPKDTLMISRTPEVTCVVVDVSHEDPEVKFNWYVDGVEVHNAKTKPREEQYNSTYRVVSVLTVLHQDWLNGKEYKCKVSNKALPAPIEKTISKAKGQPREPQVYTLPPSREEMTKNQVSLTCLVKGFYPSDIAVEWESNGQPENNYKTTPPVLDSDGSFFLYSKLTVDKSRWQQGNVFSCSVMHEALHNHYTQKSLSLSPGK

SEQ ID NO: 918 - protein, 214 aa, Artificial Sequence
  Description of Artificial Sequence: Synthetic polypeptide
NTQMNQTPSSLSASLGDTITITCHASQNINVWLSWYQQKPGNIPKLLIYKASNLHTGVPSRFSGSGSGTGFTLTISSLQPEDIATYYCQQGQSYPLTFGSGTKLEMKRTVAAPSVFIFPPSDEQLKSGTASVVCLLNNFYPREAKVQWKVDNALQSGNSQESVTEQDSKDSTYSLSSTLTLSKADYEKHKVYACEVTHQGLSSPVTKSFNRGEC

SEQ ID NO: 919 - protein, 5 aa, Artificial Sequence
  Description of Artificial Sequence: Synthetic peptide
SYWMN

SEQ ID NO: 920 - protein, 17 aa, Artificial Sequence
  Description of Artificial Sequence: Synthetic peptide
AVNPTNYYTEYIQKFKD

SEQ ID NO: 921 - protein, 14 aa, Artificial Sequence
  Description of Artificial Sequence: Synthetic peptide
SGLYNTNHLAWFAY

SEQ ID NO: 922 - protein, 11 aa, Artificial Sequence
  Description of Artificial Sequence: Synthetic peptide
RASENIHNYLA

SEQ ID NO: 923 - protein, 7 aa, Artificial Sequence
  Description of Artificial Sequence: Synthetic peptide
NAKTLAN

SEQ ID NO: 924 - protein, 9 aa, Artificial Sequence
  Description of Artificial Sequence: Synthetic peptide
QHFWTTPLT

SEQ ID NO: 925 - protein, 7 aa, Artificial Sequence
  Description of Artificial Sequence: Synthetic peptide
GYTFTSY

SEQ ID NO: 926 - protein, 6 aa, Artificial Sequence
  Description of Artificial Sequence: Synthetic peptide
NPTNYY

SEQ ID NO: 927 - protein, 13 aa, Artificial Sequence
  Description of Artificial Sequence: Synthetic peptide
SGLYNTNHLAWFA

SEQ ID NO: 928 - protein, 7 aa, Artificial Sequence
  Description of Artificial Sequence: Synthetic peptide
SENIHNY

SEQ ID NO: 929 - protein, 3 aa, Artificial Sequence
  Description of Artificial Sequence: Synthetic peptide
NAK

SEQ ID NO: 930 - protein, 6 aa, Artificial Sequence
  Description of Artificial Sequence: Synthetic peptide
FWTTPL

SEQ ID NO: 931 - protein, 10 aa, Artificial Sequence
  Description of Artificial Sequence: Synthetic peptide
GYTFTSYWMN

SEQ ID NO: 932 - protein, 10 aa, Artificial Sequence
  Description of Artificial Sequence: Synthetic peptide
AVNPTNYYTE

SEQ ID NO: 933 - protein, 14 aa, Artificial Sequence
  Description of Artificial Sequence: Synthetic peptide
SGLYNTNHLAWFAY

SEQ ID NO: 934 - protein, 11 aa, Artificial Sequence
  Description of Artificial Sequence: Synthetic peptide
RASENIHNYLA

SEQ ID NO: 935 - protein, 7 aa, Artificial Sequence
  Description of Artificial Sequence: Synthetic peptide
NAKTLAN

SEQ ID NO: 936 - protein, 9 aa, Artificial Sequence
  Description of Artificial Sequence: Synthetic peptide
QHFWTTPLT

SEQ ID NO: 937 - protein, 6 aa, Artificial Sequence
  Description of Artificial Sequence: Synthetic peptide
TSYWMN

SEQ ID NO: 938 - protein, 13 aa, Artificial Sequence
  Description of Artificial Sequence: Synthetic peptide
WIGAVNPTNYYTE

SEQ ID NO: 939 - protein, 15 aa, Artificial Sequence
  Description of Artificial Sequence: Synthetic peptide
ARSGLYNTNHLAWFA

SEQ ID NO: 940 - protein, 7 aa, Artificial Sequence
  Description of Artificial Sequence: Synthetic peptide
HNYLAWY

SEQ ID NO: 941 - protein, 10 aa, Artificial Sequence
  Description of Artificial Sequence: Synthetic peptide
LLVYNAKTLA

SEQ ID NO: 942 - protein, 8 aa, Artificial Sequence
  Description of Artificial Sequence: Synthetic peptide
QHFWTTPL

SEQ ID NO: 943 - protein, 8 aa, Artificial Sequence
  Description of Artificial Sequence: Synthetic peptide
GYTFTSYW

SEQ ID NO: 944 - protein, 8 aa, Artificial Sequence
  Description of Artificial Sequence: Synthetic peptide
VNPTNYYT

SEQ ID NO: 945 - protein, 16 aa, Artificial Sequence
  Description of Artificial Sequence: Synthetic peptide
ARSGLYNTNHLAWFAY

SEQ ID NO: 946 - protein, 6 aa, Artificial Sequence
  Description of Artificial Sequence: Synthetic peptide
ENIHNY

SEQ ID NO: 947 - protein, 3 aa, Artificial Sequence
  Description of Artificial Sequence: Synthetic peptide
NAK

SEQ ID NO: 948 - protein, 9 aa, Artificial Sequence
  Description of Artificial Sequence: Synthetic peptide
QHFWTTPLT

SEQ ID NO: 949 - protein, 123 aa, Artificial Sequence
  Description of Artificial Sequence: Synthetic polypeptide
EVQLQQSGAALAKPGTSVKMSCKASGYTFTSYWMNWVRQRPGQGLEWIGAVNPTNYYTEYIQKFKDKAILTADKSSSTAYMHLSGLTSEDSAVYYCARSGLYNTNHLAWFAYWGQGTTVTVSS

SEQ ID NO: 950 - protein, 107 aa, Artificial Sequence
  Description of Artificial Sequence: Synthetic polypeptide
DIKMTQSPASLSASVGETVTITCRASENIHNYLAWYQQIQGKSPQLLVYNAKTLANGVPSRFSGSASGTQFSLTINSLQPEDFGSYYCQHFWTTPLTFGAGTKLELK

SEQ ID NO: 951 - protein, 453 aa, Artificial Sequence
  Description of Artificial Sequence: Synthetic polypeptide
EVQLQQSGAALAKPGTSVKMSCKASGYTFTSYWMNWVRQRPGQGLEWIGAVNPTNYYTEYIQKFKDKAILTADKSSSTAYMHLSGLTSEDSAVYYCARSGLYNTNHLAWFAYWGQGTTVTVSSASTKGPSVFPLAPSSKSTSGGTAALGCLVKDYFPEPVTVSWNSGALTSGVHTFPAVLQSSGLYSLSSVVTVPSSSLGTQTYICNVNHKPSNTKVDKKVEPKSCDKTHTCPPCPAPELLGGPSVFLFPPKPKDTLMISRTPEVTCVVVDVSHEDPEVKFNWYVDGVEVHNAKTKPREEQYNSTYRVVSVLTVLHQDWLNGKEYKCKVSNKALPAPIEKTISKAKGQPREPQVYTLPPSREEMTKNQVSLTCLVKGFYPSDIAVEWESNGQPENNYKTTPPVLDSDGSFFLYSKLTVDKSRWQQGNVFSCSVMHEALHNHYTQKSLSLSPGK

SEQ ID NO: 952 - protein, 214 aa, Artificial Sequence
  Description of Artificial Sequence: Synthetic polypeptide
DIKMTQSPASLSASVGETVTITCRASENIHNYLAWYQQIQGKSPQLLVYNAKTLANGVPSRFSGSASGTQFSLTINSLQPEDFGSYYCQHFWTTPLTFGAGTKLELKRTVAAPSVFIFPPSDEQLKSGTASVVCLLNNFYPREAKVQWKVDNALQSGNSQESVTEQDSKDSTYSLSSTLTLSKADYEKHKVYACEVTHQGLSSPVTKSFNRGEC

SEQ ID NO: 953 - protein, 5 aa, Artificial Sequence
  Description of Artificial Sequence: Synthetic peptide
SYWMH

SEQ ID NO: 954 - protein, 17 aa, Artificial Sequence
  Description of Artificial Sequence: Synthetic peptide
NIDPSDSETHYNQKFKD

SEQ ID NO: 955 - protein, 15 aa, Artificial Sequence
  Description of Artificial Sequence: Synthetic peptide
VYYSYYSYDATYFDY

SEQ ID NO: 956 - protein, 11 aa, Artificial Sequence
  Description of Artificial Sequence: Synthetic peptide
RASENIYSYLA

SEQ ID NO: 957 - protein, 7 aa, Artificial Sequence
  Description of Artificial Sequence: Synthetic peptide
NAKTLAE

SEQ ID NO: 958 - protein, 9 aa, Artificial Sequence
  Description of Artificial Sequence: Synthetic peptide
QHHYTTPLT

SEQ ID NO: 959 - protein, 7 aa, Artificial Sequence
  Description of Artificial Sequence: Synthetic peptide
GYSFNSY

SEQ ID NO: 960 - protein, 6 aa, Artificial Sequence
  Description of Artificial Sequence: Synthetic peptide
DPSDSE

SEQ ID NO: 961 - protein, 14 aa, Artificial Sequence
  Description of Artificial Sequence: Synthetic peptide
VYYSYYSYDATYFD

SEQ ID NO: 962 - protein, 7 aa, Artificial Sequence
  Description of Artificial Sequence: Synthetic peptide
SENIYSY

SEQ ID NO: 963 - protein, 3 aa, Artificial Sequence
  Description of Artificial Sequence: Synthetic peptide
NAK

SEQ ID NO: 964 - protein, 6 aa, Artificial Sequence
  Description of Artificial Sequence: Synthetic peptide
HYTTPL

SEQ ID NO: 965 - protein, 10 aa, Artificial Sequence
  Description of Artificial Sequence: Synthetic peptide
GYSFNSYWMH

SEQ ID NO: 966 - protein, 10 aa, Artificial Sequence
  Description of Artificial Sequence: Synthetic peptide
NIDPSDSETH

SEQ ID NO: 967 - protein, 15 aa, Artificial Sequence
  Description of Artificial Sequence: Synthetic peptide
VYYSYYSYDATYFDY

SEQ ID NO: 968 - protein, 11 aa, Artificial Sequence
  Description of Artificial Sequence: Synthetic peptide
RASENIYSYLA

SEQ ID NO: 969 - protein, 7 aa, Artificial Sequence
  Description of Artificial Sequence: Synthetic peptide
NAKTLAE

SEQ ID NO: 970 - protein, 9 aa, Artificial Sequence
  Description of Artificial Sequence: Synthetic peptide
QHHYTTPLT

SEQ ID NO: 971 - protein, 6 aa, Artificial Sequence
  Description of Artificial Sequence: Synthetic peptide
NSYWMH

SEQ ID NO: 972 - protein, 13 aa, Artificial Sequence
  Description of Artificial Sequence: Synthetic peptide
WIGNIDPSDSETH

SEQ ID NO: 973 - protein, 16 aa, Artificial Sequence
  Description of Artificial Sequence: Synthetic peptide
ARVYYSYYSYDATYFD

SEQ ID NO: 974 - protein, 7 aa, Artificial Sequence
  Description of Artificial Sequence: Synthetic peptide
YSYLAWY

SEQ ID NO: 975 - protein, 10 aa, Artificial Sequence
  Description of Artificial Sequence: Synthetic peptide
LLVYNAKTLA

SEQ ID NO: 976 - protein, 8 aa, Artificial Sequence
  Description of Artificial Sequence: Synthetic peptide
QHHYTTPL

SEQ ID NO: 977 - protein, 8 aa, Artificial Sequence
  Description of Artificial Sequence: Synthetic peptide
GYSFNSYW

SEQ ID NO: 978 - protein, 8 aa, Artificial Sequence
  Description of Artificial Sequence: Synthetic peptide
IDPSDSET

SEQ ID NO: 979 - protein, 17 aa, Artificial Sequence
  Description of Artificial Sequence: Synthetic peptide
ARVYYSYYSYDATYFDY

SEQ ID NO: 980 - protein, 6 aa, Artificial Sequence
  Description of Artificial Sequence: Synthetic peptide
ENIYSY

SEQ ID NO: 981 - protein, 3 aa, Artificial Sequence
  Description of Artificial Sequence: Synthetic peptide
NAK

SEQ ID NO: 982 - protein, 9 aa, Artificial Sequence
  Description of Artificial Sequence: Synthetic peptide
QHHYTTPLT

SEQ ID NO: 983 - protein, 124 aa, Artificial Sequence
  Description of Artificial Sequence: Synthetic polypeptide
QVQLQQPGAELVKPGASVKLSCKASGYSFNSYWMHWVKQRPGQGLEWIGNIDPSDSETHYNQKFKDKATLTVDKSSSTAYMQLSSLTSEDSAVYYCARVYYSYYSYDATYFDYWGQGTTLTVSS

SEQ ID NO: 984 - protein, 107 aa, Artificial Sequence
  Description of Artificial Sequence: Synthetic polypeptide
DIQMTQSPASLSASVGETVTITCRASENIYSYLAWYQQKQGKSPQLLVYNAKTLAEGVPSRFSGSGSGTQFSLKINSLQPEDFGSYYCQHHYTTPLTFGGGTKLEIK

SEQ ID NO: 985 - protein, 454 aa, Artificial Sequence
  Description of Artificial Sequence: Synthetic polypeptide
QVQLQQPGAELVKPGASVKLSCKASGYSFNSYWMHWVKQRPGQGLEWIGNIDPSDSETHYNQKFKDKATLTVDKSSSTAYMQLSSLTSEDSAVYYCARVYYSYYSYDATYFDYWGQGTTLTVSSASTKGPSVFPLAPSSKSTSGGTAALGCLVKDYFPEPVTVSWNSGALTSGVHTFPAVLQSSGLYSLSSVVTVPSSSLGTQTYICNVNHKPSNTKVDKKVEPKSCDKTHTCPPCPAPELLGGPSVFLFPPKPKDTLMISRTPEVTCVVVDVSHEDPEVKFNWYVDGVEVHNAKTKPREEQYNSTYRVVSVLTVLHQDWLNGKEYKCKVSNKALPAPIEKTISKAKGQPREPQVYTLPPSREEMTKNQVSLTCLVKGFYPSDIAVEWESNGQPENNYKTTPPVLDSDGSFFLYSKLTVDKSRWQQGNVFSCSVMHEALHNHYTQKSLSLSPGK

SEQ ID NO: 986 - protein, 214 aa, Artificial Sequence
  Description of Artificial Sequence: Synthetic polypeptide
DIQMTQSPASLSASVGETVTITCRASENIYSYLAWYQQKQGKSPQLLVYNAKTLAEGVPSRFSGSGSGTQFSLKINSLQPEDFGSYYCQHHYTTPLTFGGGTKLEIKRTVAAPSVFIFPPSDEQLKSGTASVVCLLNNFYPREAKVQWKVDNALQSGNSQESVTEQDSKDSTYSLSSTLTLSKADYEKHKVYACEVTHQGLSSPVTKSFNRGEC

SEQ ID NO: 987 - protein, 5 aa, Artificial Sequence
  Description of Artificial Sequence: Synthetic peptide
SYSVH

SEQ ID NO: 988 - protein, 16 aa, Artificial Sequence
  Description of Artificial Sequence: Synthetic peptide
VIWAGGSTNYNSAFMS

SEQ ID NO: 989 - protein, 11 aa, Artificial Sequence
  Description of Artificial Sequence: Synthetic peptide
HSYYSFDAFDY

SEQ ID NO: 990 - protein, 11 aa, Artificial Sequence
  Description of Artificial Sequence: Synthetic peptide
KASQNVNTDVA

SEQ ID NO: 991 - protein, 7 aa, Artificial Sequence
  Description of Artificial Sequence: Synthetic peptide
SASYRYS

SEQ ID NO: 992 - protein, 9 aa, Artificial Sequence
  Description of Artificial Sequence: Synthetic peptide
QQCNSYPLT

SEQ ID NO: 993 - protein, 7 aa, Artificial Sequence
  Description of Artificial Sequence: Synthetic peptide
GFSLTSY

SEQ ID NO: 994 - protein, 5 aa, Artificial Sequence
  Description of Artificial Sequence: Synthetic peptide
WAGGS

SEQ ID NO: 995 - protein, 10 aa, Artificial Sequence
  Description of Artificial Sequence: Synthetic peptide
HSYYSFDAFD

SEQ ID NO: 996 - protein, 7 aa, Artificial Sequence
  Description of Artificial Sequence: Synthetic peptide
SQNVNTD

SEQ ID NO: 997 - protein, 3 aa, Artificial Sequence
  Description of Artificial Sequence: Synthetic peptide
SAS

SEQ ID NO: 998 - protein, 6 aa, Artificial Sequence
  Description of Artificial Sequence: Synthetic peptide
CNSYPL

SEQ ID NO: 999 - protein, 10 aa, Artificial Sequence
  Description of Artificial Sequence: Synthetic peptide
GFSLTSYSVH

SEQ ID NO: 1000 - protein, 9 aa, Artificial Sequence
  Description of Artificial Sequence: Synthetic peptide
VIWAGGSTN

SEQ ID NO: 1001 - protein, 11 aa, Artificial Sequence
  Description of Artificial Sequence: Synthetic peptide
HSYYSFDAFDY

SEQ ID NO: 1002 - protein, 11 aa, Artificial Sequence
  Description of Artificial Sequence: Synthetic peptide
KASQNVNTDVA

SEQ ID NO: 1003 - protein, 7 aa, Artificial Sequence
  Description of Artificial Sequence: Synthetic peptide
SASYRYS

SEQ ID NO: 1004 - protein, 9 aa, Artificial Sequence
  Description of Artificial Sequence: Synthetic peptide
QQCNSYPLT

SEQ ID NO: 1005 - protein, 6 aa, Artificial Sequence
  Description of Artificial Sequence: Synthetic peptide
TSYSVH

SEQ ID NO: 1006 - protein, 12 aa, Artificial Sequence
  Description of Artificial Sequence: Synthetic peptide
WLGVIWAGGSTN

SEQ ID NO: 1007 - protein, 12 aa, Artificial Sequence
  Description of Artificial Sequence: Synthetic peptide
AKHSYYSFDAFD

SEQ ID NO: 1008 - protein, 7 aa, Artificial Sequence
  Description of Artificial Sequence: Synthetic peptide
NTDVAWY

SEQ ID NO: 1009 - protein, 10 aa, Artificial Sequence
  Description of Artificial Sequence: Synthetic peptide
ALIYSASYRY

SEQ ID NO: 1010 - protein, 8 aa, Artificial Sequence
  Description of Artificial Sequence: Synthetic peptide
QQCNSYPL

SEQ ID NO: 1011 - protein, 8 aa, Artificial Sequence
  Description of Artificial Sequence: Synthetic peptide
GFSLTSYS

SEQ ID NO: 1012 - protein, 7 aa, Artificial Sequence
  Description of Artificial Sequence: Synthetic peptide
IWAGGST

SEQ ID NO: 1013 - protein, 13 aa, Artificial Sequence
  Description of Artificial Sequence: Synthetic peptide
AKHSYYSFDAFDY

SEQ ID NO: 1014 - protein, 6 aa, Artificial Sequence
  Description of Artificial Sequence: Synthetic peptide
QNVNTD

SEQ ID NO: 1015 - protein, 3 aa, Artificial Sequence
  Description of Artificial Sequence: Synthetic peptide
SAS

SEQ ID NO: 1016 - protein, 9 aa, Artificial Sequence
  Description of Artificial Sequence: Synthetic peptide
QQCNSYPLT

SEQ ID NO: 1017 - protein, 119 aa, Artificial Sequence
  Description of Artificial Sequence: Synthetic polypeptide
DVQLQESGPILVAPSQSLSITCTVSGFSLTSYSVHWVRQPPGKGLEWLGVIWAGGSTNYNSAFMSRLTISKDNSESQVFLKMISLQTDDTAMYYCAKHSYYSFDAFDYWGQGTTLTVSS

SEQ ID NO: 1018 - protein, 107 aa, Artificial Sequence
  Description of Artificial Sequence: Synthetic polypeptide
DIVMTQSQKFMSTSVGDRVRVTCKASQNVNTDVAWYQQKPGQSPKALIYSASYRYSGVPDRFTGSGSGTDFTLTISNVQSEDLAEYFCQQCNSYPLTFGAGTKLELK

SEQ ID NO: 1019 - protein, 449 aa, Artificial Sequence
  Description of Artificial Sequence: Synthetic polypeptide
DVQLQESGPILVAPSQSLSITCTVSGFSLTSYSVHWVRQPPGKGLEWLGVIWAGGSTNYNSAFMSRLTISKDNSESQVFLKMISLQTDDTAMYYCAKHSYYSFDAFDYWGQGTTLTVSSASTKGPSVFPLAPSSKSTSGGTAALGCLVKDYFPEPVTVSWNSGALTSGVHTFPAVLQSSGLYSLSSVVTVPSSSLGTQTYICNVNHKPSNTKVDKKVEPKSCDKTHTCPPCPAPELLGGPSVFLFPPKPKDTLMISRTPEVTCVVVDVSHEDPEVKFNWYVDGVEVHNAKTKPREEQYNSTYRVVSVLTVLHQDWLNGKEYKCKVSNKALPAPIEKTISKAKGQPREPQVYTLPPSREEMTKNQVSLTCLVKGFYPSDIAVEWESNGQPENNYKTTPPVLDSDGSFFLYSKLTVDKSRWQQGNVFSCSVMHEALHNHYTQKSLSLSPGK

SEQ ID NO: 1020 - protein, 214 aa, Artificial Sequence
  Description of Artificial Sequence: Synthetic polypeptide
DIVMTQSQKFMSTSVGDRVRVTCKASQNVNTDVAWYQQKPGQSPKALIYSASYRYSGVPDRFTGSGSGTDFTLTISNVQSEDLAEYFCQQCNSYPLTFGAGTKLELKRTVAAPSVFIFPPSDEQLKSGTASVVCLLNNFYPREAKVQWKVDNALQSGNSQESVTEQDSKDSTYSLSSTLTLSKADYEKHKVYACEVTHQGLSSPVTKSFNRGEC

SEQ ID NO: 1021 - protein, 6 aa, Artificial Sequence
  Description of Artificial Sequence: Synthetic peptide
SGYYWN

SEQ ID NO: 1022 - protein, 16 aa, Artificial Sequence
  Description of Artificial Sequence: Synthetic peptide
YINYDGRNNYNPSLKN

SEQ ID NO: 1023 - protein, 11 aa, Artificial Sequence
  Description of Artificial Sequence: Synthetic peptide
DQGYSKFYFDY

SEQ ID NO: 1024 - protein, 11 aa, Artificial Sequence
  Description of Artificial Sequence: Synthetic peptide
KASEDIYNRLA

SEQ ID NO: 1025 - protein, 7 aa, Artificial Sequence
  Description of Artificial Sequence: Synthetic peptide
GATSLET

SEQ ID NO: 1026 - protein, 9 aa, Artificial Sequence
  Description of Artificial Sequence: Synthetic peptide
QQYWSFPRT

SEQ ID NO: 1027 - protein, 8 aa, Artificial Sequence
  Description of Artificial Sequence: Synthetic peptide
GYSITSGY

SEQ ID NO: 1028 - protein, 5 aa, Artificial Sequence
  Description of Artificial Sequence: Synthetic peptide
NYDGR

SEQ ID NO: 1029 - protein, 10 aa, Artificial Sequence
  Description of Artificial Sequence: Synthetic peptide
DQGYSKFYFD

SEQ ID NO: 1030 - protein, 7 aa, Artificial Sequence
  Description of Artificial Sequence: Synthetic peptide
SEDIYNR

SEQ ID NO: 1031 - protein, 3 aa, Artificial Sequence
  Description of Artificial Sequence: Synthetic peptide
GAT

SEQ ID NO: 1032 - protein, 6 aa, Artificial Sequence
  Description of Artificial Sequence: Synthetic peptide
YWSFPR

SEQ ID NO: 1033 - protein, 11 aa, Artificial Sequence
  Description of Artificial Sequence: Synthetic peptide
GYSITSGYYWN

SEQ ID NO: 1034 - protein, 9 aa, Artificial Sequence
  Description of Artificial Sequence: Synthetic peptide
YINYDGRNN

SEQ ID NO: 1035 - protein, 11 aa, Artificial Sequence
  Description of Artificial Sequence: Synthetic peptide
DQGYSKFYFDY

SEQ ID NO: 1036 - protein, 11 aa, Artificial Sequence
  Description of Artificial Sequence: Synthetic peptide
KASEDIYNRLA

SEQ ID NO: 1037 - protein, 7 aa, Artificial Sequence
  Description of Artificial Sequence: Synthetic peptide
GATSLET

SEQ ID NO: 1038 - protein, 9 aa, Artificial Sequence
  Description of Artificial Sequence: Synthetic peptide
QQYWSFPRT

SEQ ID NO: 1039 - protein, 7 aa, Artificial Sequence
  Description of Artificial Sequence: Synthetic peptide
TSGYYWN

SEQ ID NO: 1040 - protein, 12 aa, Artificial Sequence
  Description of Artificial Sequence: Synthetic peptide
WMGYINYDGRNN

SEQ ID NO: 1041 - protein, 12 aa, Artificial Sequence
  Description of Artificial Sequence: Synthetic peptide
SRDQGYSKFYFD

SEQ ID NO: 1042 - protein, 7 aa, Artificial Sequence
  Description of Artificial Sequence: Synthetic peptide
YNRLAWY

SEQ ID NO: 1043 - protein, 10 aa, Artificial Sequence
  Description of Artificial Sequence: Synthetic peptide
LLISGATSLE

SEQ ID NO: 1044 - protein, 8 aa, Artificial Sequence
  Description of Artificial Sequence: Synthetic peptide
QQYWSFPR

SEQ ID NO: 1045 - protein, 9 aa, Artificial Sequence
  Description of Artificial Sequence: Synthetic peptide
GYSITSGYY

SEQ ID NO: 1046 - protein, 7 aa, Artificial Sequence
  Description of Artificial Sequence: Synthetic peptide
INYDGRN

SEQ ID NO: 1047 - protein, 13 aa, Artificial Sequence
  Description of Artificial Sequence: Synthetic peptide
SRDQGYSKFYFDY

SEQ ID NO: 1048 - protein, 6 aa, Artificial Sequence
  Description of Artificial Sequence: Synthetic peptide
EDIYNR

SEQ ID NO: 1049 - protein, 3 aa, Artificial Sequence
  Description of Artificial Sequence: Synthetic peptide
GAT

SEQ ID NO: 1050 - protein, 9 aa, Artificial Sequence
  Description of Artificial Sequence: Synthetic peptide
QQYWSFPRT

SEQ ID NO: 1051 - protein, 120 aa, Artificial Sequence
  Description of Artificial Sequence: Synthetic polypeptide
QVQLKESGPGLVKPSQSLSLTCSVTGYSITSGYYWNWIRQFPGNKLEWMGYINYDGRNNYNPSLKNRISITRDTSKNHFFLKLNSVTTEDTATYYCSRDQGYSKFYFDYWGQGTTLTVSS

SEQ ID NO: 1052 - protein, 107 aa, Artificial Sequence
  Description of Artificial Sequence: Synthetic polypeptide
DIQMTQSSSSFSVSLGDRVTITCKASEDIYNRLAWYQQRPGNAPRLLISGATSLETGVPSRFSGGGSGKDYTLSITSLQTEDVANYYCQQYWSFPRTFGGGTKLEIK

SEQ ID NO: 1053 - protein, 450 aa, Artificial Sequence
  Description of Artificial Sequence: Synthetic polypeptide
QVQLKESGPGLVKPSQSLSLTCSVTGYSITSGYYWNWIRQFPGNKLEWMGYINYDGRNNYNPSLKNRISITRDTSKNHFFLKLNSVTTEDTATYYCSRDQGYSKFYFDYWGQGTTLTVSSASTKGPSVFPLAPSSKSTSGGTAALGCLVKDYFPEPVTVSWNSGALTSGVHTFPAVLQSSGLYSLSSVVTVPSSSLGTQTYICNVNHKPSNTKVDKKVEPKSCDKTHTCPPCPAPELLGGPSVFLFPPKPKDTLMISRTPEVTCVVVDVSHEDPEVKFNWYVDGVEVHNAKTKPREEQYNSTYRVVSVLTVLHQDWLNGKEYKCKVSNKALPAPIEKTISKAKGQPREPQVYTLPPSREEMTKNQVSLTCLVKGFYPSDIAVEWESNGQPENNYKTTPPVLDSDGSFFLYSKLTVDKSRWQQGNVFSCSVMHEALHNHYTQKSLSLSPGK

SEQ ID NO: 1054 - protein, 214 aa, Artificial Sequence
  Description of Artificial Sequence: Synthetic polypeptide
DIQMTQSSSSFSVSLGDRVTITCKASEDIYNRLAWYQQRPGNAPRLLISGATSLETGVPSRFSGGGSGKDYTLSITSLQTEDVANYYCQQYWSFPRTFGGGTKLEIKRTVAAPSVFIFPPSDEQLKSGTASVVCLLNNFYPREAKVQWKVDNALQSGNSQESVTEQDSKDSTYSLSSTLTLSKADYEKHKVYACEVTHQGLSSPVTKSFNRGEC

SEQ ID NO: 1055 - protein, 5 aa, Artificial Sequence
  Description of Artificial Sequence: Synthetic peptide
TYAVH

SEQ ID NO: 1056 - protein, 16 aa, Artificial Sequence
  Description of Artificial Sequence: Synthetic peptide
VIWSGGSTDYNAAFIS

SEQ ID NO: 1057 - protein, 11 aa, Artificial Sequence
  Description of Artificial Sequence: Synthetic peptide
HSYYHYNAMDN

SEQ ID NO: 1058 - protein, 11 aa, Artificial Sequence
  Description of Artificial Sequence: Synthetic peptide
KASQNVGTAVA

SEQ ID NO: 1059 - protein, 7 aa, Artificial Sequence
  Description of Artificial Sequence: Synthetic peptide
SASNRYT

SEQ ID NO: 1060 - protein, 9 aa, Artificial Sequence
  Description of Artificial Sequence: Synthetic peptide
QQYSSYPFT

SEQ ID NO: 1061 - protein, 7 aa, Artificial Sequence
  Description of Artificial Sequence: Synthetic peptide
GFSLTTY

SEQ ID NO: 1062 - protein, 5 aa, Artificial Sequence
  Description of Artificial Sequence: Synthetic peptide
WSGGS

SEQ ID NO: 1063 - protein, 10 aa, Artificial Sequence
  Description of Artificial Sequence: Synthetic peptide
HSYYHYNAMD

SEQ ID NO: 1064 - protein, 7 aa, Artificial Sequence
  Description of Artificial Sequence: Synthetic peptide
SQNVGTA

SEQ ID NO: 1065 - protein, 3 aa, Artificial Sequence
  Description of Artificial Sequence: Synthetic peptide
SAS

SEQ ID NO: 1066 - protein, 6 aa, Artificial Sequence
  Description of Artificial Sequence: Synthetic peptide
YSSYPF

SEQ ID NO: 1067 - protein, 10 aa, Artificial Sequence
  Description of Artificial Sequence: Synthetic peptide
GFSLTTYAVH

SEQ ID NO: 1068 - protein, 9 aa, Artificial Sequence
  Description of Artificial Sequence: Synthetic peptide
VIWSGGSTD

SEQ ID NO: 1069 - protein, 11 aa, Artificial Sequence
  Description of Artificial Sequence: Synthetic peptide
HSYYHYNAMDN

SEQ ID NO: 1070 - protein, 11 aa, Artificial Sequence
  Description of Artificial Sequence: Synthetic peptide
KASQNVGTAVA

SEQ ID NO: 1071 - protein, 7 aa, Artificial Sequence
  Description of Artificial Sequence: Synthetic peptide
SASNRYT

SEQ ID NO: 1072 - protein, 9 aa, Artificial Sequence
  Description of Artificial Sequence: Synthetic peptide
QQYSSYPFT

SEQ ID NO: 1073 - protein, 6 aa, Artificial Sequence
  Description of Artificial Sequence: Synthetic peptide
TTYAVH

SEQ ID NO: 1074 - protein, 12 aa, Artificial Sequence
  Description of Artificial Sequence: Synthetic peptide
WLGVIWSGGSTD

SEQ ID NO: 1075 - protein, 12 aa, Artificial Sequence
  Description of Artificial Sequence: Synthetic peptide
ARHSYYHYNAMD

SEQ ID NO: 1076 - protein, 7 aa, Artificial Sequence
  Description of Artificial Sequence: Synthetic peptide
GTAVAWY

SEQ ID NO: 1077 - protein, 10 aa, Artificial Sequence
  Description of Artificial Sequence: Synthetic peptide
LLIYSASNRY

SEQ ID NO: 1078 - protein, 8 aa, Artificial Sequence
  Description of Artificial Sequence: Synthetic peptide
QQYSSYPF

SEQ ID NO: 1079 - protein, 8 aa, Artificial Sequence
  Description of Artificial Sequence: Synthetic peptide
GFSLTTYA

SEQ ID NO: 1080 - protein, 7 aa, Artificial Sequence
  Description of Artificial Sequence: Synthetic peptide
IWSGGST

SEQ ID NO: 1081 - protein, 13 aa, Artificial Sequence
  Description of Artificial Sequence: Synthetic peptide
ARHSYYHYNAMDN

SEQ ID NO: 1082 - protein, 6 aa, Artificial Sequence
  Description of Artificial Sequence: Synthetic peptide
QNVGTA

SEQ ID NO: 1083 - protein, 3 aa, Artificial Sequence
  Description of Artificial Sequence: Synthetic peptide
SAS

SEQ ID NO: 1084 - protein, 9 aa, Artificial Sequence
  Description of Artificial Sequence: Synthetic peptide
QQYSSYPFT

SEQ ID NO: 1085 - protein, 119 aa, Artificial Sequence
  Description of Artificial Sequence: Synthetic polypeptide
QVQLKGSGPGLVQPSQSLSITCTVSGFSLTTYAVHWVRQSPGKGLEWLGVIWSGGSTDYNAAFISRLSISKDNSKSQVFFKMNSLQADDTAIYYCARHSYYHYNAMDNWGQGTSVTVSS

SEQ ID NO: 1086 - protein, 107 aa, Artificial Sequence
  Description of Artificial Sequence: Synthetic polypeptide
DIKMTQSQKFMSTTVGDRVSITCKASQNVGTAVAWYQQKPGQSPKLLIYSASNRYTGVPDRFTGSGSGTDFTLTISNMQSEDLADYFCQQYSSYPFTFGSGTKLEIK

SEQ ID NO: 1087 - protein, 449 aa, Artificial Sequence
  Description of Artificial Sequence: Synthetic polypeptide
QVQLKGSGPGLVQPSQSLSITCTVSGFSLTTYAVHWVRQSPGKGLEWLGVIWSGGSTDYNAAFISRLSISKDNSKSQVFFKMNSLQADDTAIYYCARHSYYHYNAMDNWGQGTSVTVSSASTKGPSVFPLAPSSKSTSGGTAALGCLVKDYFPEPVTVSWNSGALTSGVHTFPAVLQSSGLYSLSSVVTVPSSSLGTQTYICNVNHKPSNTKVDKKVEPKSCDKTHTCPPCPAPELLGGPSVFLFPPKPKDTLMISRTPEVTCVVVDVSHEDPEVKFNWYVDGVEVHNAKTKPREEQYNSTYRVVSVLTVLHQDWLNGKEYKCKVSNKALPAPIEKTISKAKGQPREPQVYTLPPSREEMTKNQVSLTCLVKGFYPSDIAVEWESNGQPENNYKTTPPVLDSDGSFFLYSKLTVDKSRWQQGNVFSCSVMHEALHNHYTQKSLSLSPGK

SEQ ID NO: 1088 - protein, 214 aa, Artificial Sequence
  Description of Artificial Sequence: Synthetic polypeptide
DIKMTQSQKFMSTTVGDRVSITCKASQNVGTAVAWYQQKPGQSPKLLIYSASNRYTGVPDRFTGSGSGTDFTLTISNMQSEDLADYFCQQYSSYPFTFGSGTKLEIKRTVAAPSVFIFPPSDEQLKSGTASVVCLLNNFYPREAKVQWKVDNALQSGNSQESVTEQDSKDSTYSLSSTLTLSKADYEKHKVYACEVTHQGLSSPVTKSFNRGEC

SEQ ID NO: 1089 - protein, 6 aa, Artificial Sequence
  Description of Artificial Sequence: Synthetic peptide
SGYYWN

SEQ ID NO: 1090 - protein, 16 aa, Artificial Sequence
  Description of Artificial Sequence: Synthetic peptide
YISYDGSNNYNPSLKN

SEQ ID NO: 1091 - protein, 8 aa, Artificial Sequence
  Description of Artificial Sequence: Synthetic peptide
NHGDAMDH

SEQ ID NO: 1092 - protein, 11 aa, Artificial Sequence
  Description of Artificial Sequence: Synthetic peptide
KASQNVGTDVA

SEQ ID NO: 1093 - protein, 7 aa, Artificial Sequence
  Description of Artificial Sequence: Synthetic peptide
SASYRYS

SEQ ID NO: 1094 - protein, 9 aa, Artificial Sequence
  Description of Artificial Sequence: Synthetic peptide
QQYKSYPLT

SEQ ID NO: 1095 - protein, 8 aa, Artificial Sequence
  Description of Artificial Sequence: Synthetic peptide
GYSITSGY

SEQ ID NO: 1096 - protein, 5 aa, Artificial Sequence
  Description of Artificial Sequence: Synthetic peptide
SYDGS

SEQ ID NO: 1097 - protein, 7 aa, Artificial Sequence
  Description of Artificial Sequence: Synthetic peptide
NHGDAMD

SEQ ID NO: 1098 - protein, 7 aa, Artificial Sequence
  Description of Artificial Sequence: Synthetic peptide
SQNVGTD

SEQ ID NO: 1099 - protein, 3 aa, Artificial Sequence
  Description of Artificial Sequence: Synthetic peptide
SAS

SEQ ID NO: 1100 - protein, 6 aa, Artificial Sequence
  Description of Artificial Sequence: Synthetic peptide
YKSYPL

SEQ ID NO: 1101 - protein, 11 aa, Artificial Sequence
  Description of Artificial Sequence: Synthetic peptide
GYSITSGYYWN

SEQ ID NO: 1102 - protein, 9 aa, Artificial Sequence
  Description of Artificial Sequence: Synthetic peptide
YISYDGSNN

SEQ ID NO: 1103 - protein, 8 aa, Artificial Sequence
  Description of Artificial Sequence: Synthetic peptide
NHGDAMDH

SEQ ID NO: 1104 - protein, 11 aa, Artificial Sequence
  Description of Artificial Sequence: Synthetic peptide
KASQNVGTDVA

SEQ ID NO: 1105 - protein, 7 aa, Artificial Sequence
  Description of Artificial Sequence: Synthetic peptide
SASYRYS

SEQ ID NO: 1106 - protein, 9 aa, Artificial Sequence
  Description of Artificial Sequence: Synthetic peptide
QQYKSYPLT

SEQ ID NO: 1107 - protein, 7 aa, Artificial Sequence
  Description of Artificial Sequence: Synthetic peptide
TSGYYWN

SEQ ID NO: 1108 - protein, 12 aa, Artificial Sequence
  Description of Artificial Sequence: Synthetic peptide
WMGYISYDGSNN

SEQ ID NO: 1109 - protein, 9 aa, Artificial Sequence
  Description of Artificial Sequence: Synthetic peptide
VRNHGDAMD

SEQ ID NO: 1110 - protein, 7 aa, Artificial Sequence
  Description of Artificial Sequence: Synthetic peptide
GTDVAWY

SEQ ID NO: 1111 - protein, 10 aa, Artificial Sequence
  Description of Artificial Sequence: Synthetic peptide
ALIYSASYRY

SEQ ID NO: 1112 - protein, 8 aa, Artificial Sequence
  Description of Artificial Sequence: Synthetic peptide
QQYKSYPL

SEQ ID NO: 1113 - protein, 9 aa, Artificial Sequence
  Description of Artificial Sequence: Synthetic peptide
GYSITSGYY

SEQ ID NO: 1114 - protein, 7 aa, Artificial Sequence
  Description of Artificial Sequence: Synthetic peptide
ISYDGSN

SEQ ID NO: 1115 - protein, 10 aa, Artificial Sequence
  Description of Artificial Sequence: Synthetic peptide
VRNHGDAMDH

SEQ ID NO: 1116 - protein, 6 aa, Artificial Sequence
  Description of Artificial Sequence: Synthetic peptide
QNVGTD

SEQ ID NO: 1117 - protein, 3 aa, Artificial Sequence
  Description of Artificial Sequence: Synthetic peptide
SAS

SEQ ID NO: 1118 - protein, 9 aa, Artificial Sequence
  Description of Artificial Sequence: Synthetic peptide
QQYKSYPLT

SEQ ID NO: 1119 - protein, 117 aa, Artificial Sequence
  Description of Artificial Sequence: Synthetic polypeptide
DVQLQESGPGLVKPSQSLSLTCSVTGYSITSGYYWNWIRQFPGNKLEWMGYISYDGSNNYNPSLKNRISITRDTSKNQFFLKLNSVTTEDTATYYCVRNHGDAMDHWGQGTTLTVSS

SEQ ID NO: 1120 - protein, 107 aa, Artificial Sequence
  Description of Artificial Sequence: Synthetic polypeptide
DIVMTQSQKFMSTSVGDRVRVTCKASQNVGTDVAWYQQKPGQSPKALIYSASYRYSGVPDRFTGSGSGTDFTLTISDVQSEDLAEYFCQQYKSYPLTFGAGTKLELK

SEQ ID NO: 1121 - protein, 447 aa, Artificial Sequence
  Description of Artificial Sequence: Synthetic polypeptide
DVQLQESGPGLVKPSQSLSLTCSVTGYSITSGYYWNWIRQFPGNKLEWMGYISYDGSNNYNPSLKNRISITRDTSKNQFFLKLNSVTTEDTATYYCVRNHGDAMDHWGQGTTLTVSSASTKGPSVFPLAPSSKSTSGGTAALGCLVKDYFPEPVTVSWNSGALTSGVHTFPAVLQSSGLYSLSSVVTVPSSSLGTQTYICNVNHKPSNTKVDKKVEPKSCDKTHTCPPCPAPELLGGPSVFLFPPKPKDTLMISRTPEVTCVVVDVSHEDPEVKFNWYVDGVEVHNAKTKPREEQYNSTYRVVSVLTVLHQDWLNGKEYKCKVSNKALPAPIEKTISKAKGQPREPQVYTLPPSREEMTKNQVSLTCLVKGFYPSDIAVEWESNGQPENNYKTTPPVLDSDGSFFLYSKLTVDKSRWQQGNVFSCSVMHEALHNHYTQKSLSLSPGK

SEQ ID NO: 1122 - protein, 214 aa, Artificial Sequence
  Description of Artificial Sequence: Synthetic polypeptide
DIVMTQSQKFMSTSVGDRVRVTCKASQNVGTDVAWYQQKPGQSPKALIYSASYRYSGVPDRFTGSGSGTDFTLTISDVQSEDLAEYFCQQYKSYPLTFGAGTKLELKRTVAAPSVFIFPPSDEQLKSGTASVVCLLNNFYPREAKVQWKVDNALQSGNSQESVTEQDSKDSTYSLSSTLTLSKADYEKHKVYACEVTHQGLSSPVTKSFNRGEC

SEQ ID NO: 1123 - protein, 5 aa, Artificial Sequence
  Description of Artificial Sequence: Synthetic peptide
RYSVH

SEQ ID NO: 1124 - protein, 16 aa, Artificial Sequence
  Description of Artificial Sequence: Synthetic peptide
MIWGGGSTDYNSALKS

SEQ ID NO: 1125 - protein, 11 aa, Artificial Sequence
  Description of Artificial Sequence: Synthetic peptide
IYFDNYVGFAY

SEQ ID NO: 1126 - protein, 11 aa, Artificial Sequence
  Description of Artificial Sequence: Synthetic peptide
KASQDVGTVVA

SEQ ID NO: 1127 - protein, 7 aa, Artificial Sequence
  Description of Artificial Sequence: Synthetic peptide
WTSTRHT

SEQ ID NO: 1128 - protein, 9 aa, Artificial Sequence
  Description of Artificial Sequence: Synthetic peptide
QQYSSYPYT

SEQ ID NO: 1129 - protein, 7 aa, Artificial Sequence
  Description of Artificial Sequence: Synthetic peptide
GFSLSRY

SEQ ID NO: 1130 - protein, 5 aa, Artificial Sequence
  Description of Artificial Sequence: Synthetic peptide
WGGGS

SEQ ID NO: 1131 - protein, 10 aa, Artificial Sequence
  Description of Artificial Sequence: Synthetic peptide
IYFDNYVGFA

SEQ ID NO: 1132 - protein, 7 aa, Artificial Sequence
  Description of Artificial Sequence: Synthetic peptide
SQDVGTV

SEQ ID NO: 1133 - protein, 3 aa, Artificial Sequence
  Description of Artificial Sequence: Synthetic peptide
WTS

SEQ ID NO: 1134 - protein, 6 aa, Artificial Sequence
  Description of Artificial Sequence: Synthetic peptide
YSSYPY

SEQ ID NO: 1135 - protein, 10 aa, Artificial Sequence
  Description of Artificial Sequence: Synthetic peptide
GFSLSRYSVH

SEQ ID NO: 1136 - protein, 9 aa, Artificial Sequence
  Description of Artificial Sequence: Synthetic peptide
MIWGGGSTD

SEQ ID NO: 1137 - protein, 11 aa, Artificial Sequence
  Description of Artificial Sequence: Synthetic peptide
IYFDNYVGFAY

SEQ ID NO: 1138 - protein, 11 aa, Artificial Sequence
  Description of Artificial Sequence: Synthetic peptide
KASQDVGTVVA

SEQ ID NO: 1139 - protein, 7 aa, Artificial Sequence
  Description of Artificial Sequence: Synthetic peptide
WTSTRHT

SEQ ID NO: 1140 - protein, 9 aa, Artificial Sequence
  Description of Artificial Sequence: Synthetic peptide
QQYSSYPYT

SEQ ID NO: 1141 - protein, 6 aa, Artificial Sequence
  Description of Artificial Sequence: Synthetic peptide
SRYSVH

SEQ ID NO: 1142 - protein, 12 aa, Artificial Sequence
  Description of Artificial Sequence: Synthetic peptide
WLGMIWGGGSTD

SEQ ID NO: 1143 - protein, 12 aa, Artificial Sequence
  Description of Artificial Sequence: Synthetic peptide
ARIYFDNYVGFA

SEQ ID NO: 1144 - protein, 7 aa, Artificial Sequence
  Description of Artificial Sequence: Synthetic peptide
GTVVAWY

SEQ ID NO: 1145 - protein, 10 aa, Artificial Sequence
  Description of Artificial Sequence: Synthetic peptide
LLIFWTSTRH

SEQ ID NO: 1146 - protein, 8 aa, Artificial Sequence
  Description of Artificial Sequence: Synthetic peptide
QQYSSYPY

SEQ ID NO: 1147 - protein, 8 aa, Artificial Sequence
  Description of Artificial Sequence: Synthetic peptide
GFSLSRYS

SEQ ID NO: 1148 - protein, 7 aa, Artificial Sequence
  Description of Artificial Sequence: Synthetic peptide
IWGGGST

SEQ ID NO: 1149 - protein, 13 aa, Artificial Sequence
  Description of Artificial Sequence: Synthetic peptide
ARIYFDNYVGFAY

SEQ ID NO: 1150 - protein, 6 aa, Artificial Sequence
  Description of Artificial Sequence: Synthetic peptide
QDVGTV

SEQ ID NO: 1151 - protein, 3 aa, Artificial Sequence
  Description of Artificial Sequence: Synthetic peptide
WTS

SEQ ID NO: 1152 - protein, 9 aa, Artificial Sequence
  Description of Artificial Sequence: Synthetic peptide
QQYSSYPYT

SEQ ID NO: 1153 - protein, 119 aa, Artificial Sequence
  Description of Artificial Sequence: Synthetic polypeptide
QVQLKESGPGLVAPSQSLSITCTVSGFSLSRYSVHWVRQPPGKGLVWLGMIWGGGSTDYNSALKSRLSISKDNSKSQVFLKMNSLQTDDTAMYYCARIYFDNYVGFAYWGQGTTLTVSS

SEQ ID NO: 1154 - protein, 107 aa, Artificial Sequence
  Description of Artificial Sequence: Synthetic polypeptide
DIVMTQSHKFMSTSVGDRVSITCKASQDVGTVVAWYQQKPGQSPKLLIFWTSTRHTGVPDRFTGSGSGTDFTLTISNVQSEDLADYFCQQYSSYPYTFGSGTKLELK

SEQ ID NO: 1155 - protein, 449 aa, Artificial Sequence
  Description of Artificial Sequence: Synthetic polypeptide
QVQLKESGPGLVAPSQSLSITCTVSGFSLSRYSVHWVRQPPGKGLVWLGMIWGGGSTDYNSALKSRLSISKDNSKSQVFLKMNSLQTDDTAMYYCARIYFDNYVGFAYWGQGTTLTVSSASTKGPSVFPLAPSSKSTSGGTAALGCLVKDYFPEPVTVSWNSGALTSGVHTFPAVLQSSGLYSLSSVVTVPSSSLGTQTYICNVNHKPSNTKVDKKVEPKSCDKTHTCPPCPAPELLGGPSVFLFPPKPKDTLMISRTPEVTCVVVDVSHEDPEVKFNWYVDGVEVHNAKTKPREEQYNSTYRVVSVLTVLHQDWLNGKEYKCKVSNKALPAPIEKTISKAKGQPREPQVYTLPPSREEMTKNQVSLTCLVKGFYPSDIAVEWESNGQPENNYKTTPPVLDSDGSFFLYSKLTVDKSRWQQGNVFSCSVMHEALHNHYTQKSLSLSPGK

SEQ ID NO: 1156 - protein, 214 aa, Artificial Sequence
  Description of Artificial Sequence: Synthetic polypeptide
DIVMTQSHKFMSTSVGDRVSITCKASQDVGTVVAWYQQKPGQSPKLLIFWTSTRHTGVPDRFTGSGSGTDFTLTISNVQSEDLADYFCQQYSSYPYTFGSGTKLELKRTVAAPSVFIFPPSDEQLKSGTASVVCLLNNFYPREAKVQWKVDNALQSGNSQESVTEQDSKDSTYSLSSTLTLSKADYEKHKVYACEVTHQGLSSPVTKSFNRGEC

SEQ ID NO: 1157 - protein, 5 aa, Artificial Sequence
  Description of Artificial Sequence: Synthetic peptide
NYAVH

SEQ ID NO: 1158 - protein, 16 aa, Artificial Sequence
  Description of Artificial Sequence: Synthetic peptide
VIWTDGSTDYNAGFIS

SEQ ID NO: 1159 - protein, 11 aa, Artificial Sequence
  Description of Artificial Sequence: Synthetic peptide
NNGYFPAFFAY

SEQ ID NO: 1160 - protein, 16 aa, Artificial Sequence
  Description of Artificial Sequence: Synthetic peptide
RSSQTIVHSNGNTYLE

SEQ ID NO: 1161 - protein, 7 aa, Artificial Sequence
  Description of Artificial Sequence: Synthetic peptide
KVSNRFS

SEQ ID NO: 1162 - protein, 9 aa, Artificial Sequence
  Description of Artificial Sequence: Synthetic peptide
FQGSHAPFT

SEQ ID NO: 1163 - protein, 7 aa, Artificial Sequence
  Description of Artificial Sequence: Synthetic peptide
GFSLTNY

SEQ ID NO: 1164 - protein, 5 aa, Artificial Sequence
  Description of Artificial Sequence: Synthetic peptide
WTDGS

SEQ ID NO: 1165 - protein, 10 aa, Artificial Sequence
  Description of Artificial Sequence: Synthetic peptide
NNGYFPAFFA

SEQ ID NO: 1166 - protein, 12 aa, Artificial Sequence
  Description of Artificial Sequence: Synthetic peptide
SQTIVHSNGNTY

SEQ ID NO: 1167 - protein, 3 aa, Artificial Sequence
  Description of Artificial Sequence: Synthetic peptide
KVS

SEQ ID NO: 1168 - protein, 6 aa, Artificial Sequence
  Description of Artificial Sequence: Synthetic peptide
GSHAPF

SEQ ID NO: 1169 - protein, 10 aa, Artificial Sequence
  Description of Artificial Sequence: Synthetic peptide
GFSLTNYAVH

SEQ ID NO: 1170 - protein, 9 aa, Artificial Sequence
  Description of Artificial Sequence: Synthetic peptide
VIWTDGSTD

SEQ ID NO: 1171 - protein, 11 aa, Artificial Sequence
  Description of Artificial Sequence: Synthetic peptide
NNGYFPAFFAY

SEQ ID NO: 1172 - protein, 16 aa, Artificial Sequence
  Description of Artificial Sequence: Synthetic peptide
RSSQTIVHSNGNTYLE

SEQ ID NO: 1173 - protein, 7 aa, Artificial Sequence
  Description of Artificial Sequence: Synthetic peptide
KVSNRFS

SEQ ID NO: 1174 - protein, 9 aa, Artificial Sequence
  Description of Artificial Sequence: Synthetic peptide
FQGSHAPFT

SEQ ID NO: 1175 - protein, 6 aa, Artificial Sequence
  Description of Artificial Sequence: Synthetic peptide
TNYAVH

SEQ ID NO: 1176 - protein, 12 aa, Artificial Sequence
  Description of Artificial Sequence: Synthetic peptide
WLGVIWTDGSTD

SEQ ID NO: 1177 - protein, 12 aa, Artificial Sequence
  Description of Artificial Sequence: Synthetic peptide
ARNNGYFPAFFA

SEQ ID NO: 1178 - protein, 12 aa, Artificial Sequence
  Description of Artificial Sequence: Synthetic peptide
VHSNGNTYLEWY

SEQ ID NO: 1179 - protein, 10 aa, Artificial Sequence
  Description of Artificial Sequence: Synthetic peptide
LLMYKVSNRF

SEQ ID NO: 1180 - protein, 8 aa, Artificial Sequence
  Description of Artificial Sequence: Synthetic peptide
FQGSHAPF

SEQ ID NO: 1181 - protein, 8 aa, Artificial Sequence
  Description of Artificial Sequence: Synthetic peptide
GFSLTNYA

SEQ ID NO: 1182 - protein, 7 aa, Artificial Sequence
  Description of Artificial Sequence: Synthetic peptide
IWTDGST

SEQ ID NO: 1183 - protein, 13 aa, Artificial Sequence
  Description of Artificial Sequence: Synthetic peptide
ARNNGYFPAFFAY

SEQ ID NO: 1184 - protein, 11 aa, Artificial Sequence
  Description of Artificial Sequence: Synthetic peptide
QTIVHSNGNTY

SEQ ID NO: 1185 - protein, 3 aa, Artificial Sequence
  Description of Artificial Sequence: Synthetic peptide
KVS

SEQ ID NO: 1186 - protein, 9 aa, Artificial Sequence
  Description of Artificial Sequence: Synthetic peptide
FQGSHAPFT

SEQ ID NO: 1187 - protein, 119 aa, Artificial Sequence
  Description of Artificial Sequence: Synthetic polypeptide
QVQLKESGPGLVAPSQSLSITCTVSGFSLTNYAVHWVRQSPGKGLEWLGVIWTDGSTDYNAGFISRLSISKDNSKSQVFFKMNSLQADDTAIYYCARNNGYFPAFFAYWGQGTTVTVSS

SEQ ID NO: 1188 - protein, 112 aa, Artificial Sequence
  Description of Artificial Sequence: Synthetic polypeptide
DVLMTQTPLSLPVSLGDQASISCRSSQTIVHSNGNTYLEWYLQKPGQSPKLLMYKVSNRFSGVPDRFGGSGSGTDFTLKISRVEAEDLGVYYCFQGSHAPFTFGSGTKLEIK

SEQ ID NO: 1189 - protein, 449 aa, Artificial Sequence
  Description of Artificial Sequence: Synthetic polypeptide
QVQLKESGPGLVAPSQSLSITCTVSGFSLTNYAVHWVRQSPGKGLEWLGVIWTDGSTDYNAGFISRLSISKDNSKSQVFFKMNSLQADDTAIYYCARNNGYFPAFFAYWGQGTTVTVSSASTKGPSVFPLAPSSKSTSGGTAALGCLVKDYFPEPVTVSWNSGALTSGVHTFPAVLQSSGLYSLSSVVTVPSSSLGTQTYICNVNHKPSNTKVDKKVEPKSCDKTHTCPPCPAPELLGGPSVFLFPPKPKDTLMISRTPEVTCVVVDVSHEDPEVKFNWYVDGVEVHNAKTKPREEQYNSTYRVVSVLTVLHQDWLNGKEYKCKVSNKALPAPIEKTISKAKGQPREPQVYTLPPSREEMTKNQVSLTCLVKGFYPSDIAVEWESNGQPENNYKTTPPVLDSDGSFFLYSKLTVDKSRWQQGNVFSCSVMHEALHNHYTQKSLSLSPGK

SEQ ID NO: 1190 - protein, 219 aa, Artificial Sequence
  Description of Artificial Sequence: Synthetic polypeptide
DVLMTQTPLSLPVSLGDQASISCRSSQTIVHSNGNTYLEWYLQKPGQSPKLLMYKVSNRFSGVPDRFGGSGSGTDFTLKISRVEAEDLGVYYCFQGSHAPFTFGSGTKLEIKRTVAAPSVFIFPPSDEQLKSGTASVVCLLNNFYPREAKVQWKVDNALQSGNSQESVTEQDSKDSTYSLSSTLTLSKADYEKHKVYACEVTHQGLSSPVTKSFNRGEC

SEQ ID NO: 1191 - protein, 6 aa, Artificial Sequence
  Description of Artificial Sequence: Synthetic peptide
SGYYWN

SEQ ID NO: 1192 - protein, 16 aa, Artificial Sequence
  Description of Artificial Sequence: Synthetic peptide
YINYDGRNNYNPSLRN

SEQ ID NO: 1193 - protein, 11 aa, Artificial Sequence
  Description of Artificial Sequence: Synthetic peptide
DQGYSKFYFDY

SEQ ID NO: 1194 - protein, 11 aa, Artificial Sequence
  Description of Artificial Sequence: Synthetic peptide
KASEDIYNRLA

SEQ ID NO: 1195 - protein, 7 aa, Artificial Sequence
  Description of Artificial Sequence: Synthetic peptide
GATSLET

SEQ ID NO: 1196 - protein, 9 aa, Artificial Sequence
  Description of Artificial Sequence: Synthetic peptide
QQYWSFPRT

SEQ ID NO: 1197 - protein, 8 aa, Artificial Sequence
  Description of Artificial Sequence: Synthetic peptide
GYSITSGY

SEQ ID NO: 1198 - protein, 5 aa, Artificial Sequence
  Description of Artificial Sequence: Synthetic peptide
NYDGR

SEQ ID NO: 1199 - protein, 10 aa, Artificial Sequence
  Description of Artificial Sequence: Synthetic peptide
DQGYSKFYFD

SEQ ID NO: 1200 - protein, 7 aa, Artificial Sequence
  Description of Artificial Sequence: Synthetic peptide
SEDIYNR

SEQ ID NO: 1201 - protein, 3 aa, Artificial Sequence
  Description of Artificial Sequence: Synthetic peptide
GAT

SEQ ID NO: 1202 - protein, 6 aa, Artificial Sequence
  Description of Artificial Sequence: Synthetic peptide
YWSFPR

SEQ ID NO: 1203 - protein, 11 aa, Artificial Sequence
  Description of Artificial Sequence: Synthetic peptide
GYSITSGYYWN

SEQ ID NO: 1204 - protein, 9 aa, Artificial Sequence
  Description of Artificial Sequence: Synthetic peptide
YINYDGRNN

SEQ ID NO: 1205 - protein, 11 aa, Artificial Sequence
  Description of Artificial Sequence: Synthetic peptide
DQGYSKFYFDY

SEQ ID NO: 1206 - protein, 11 aa, Artificial Sequence
  Description of Artificial Sequence: Synthetic peptide
KASEDIYNRLA

SEQ ID NO: 1207 - protein, 7 aa, Artificial Sequence
  Description of Artificial Sequence: Synthetic peptide
GATSLET

SEQ ID NO: 1208 - protein, 9 aa, Artificial Sequence
  Description of Artificial Sequence: Synthetic peptide
QQYWSFPRT

SEQ ID NO: 1209 - protein, 7 aa, Artificial Sequence
  Description of Artificial Sequence: Synthetic peptide
TSGYYWN

SEQ ID NO: 1210 - protein, 12 aa, Artificial Sequence
  Description of Artificial Sequence: Synthetic peptide
WMGYINYDGRNN

SEQ ID NO: 1211 - protein, 12 aa, Artificial Sequence
  Description of Artificial Sequence: Synthetic peptide
ARDQGYSKFYFD

SEQ ID NO: 1212 - protein, 7 aa, Artificial Sequence
  Description of Artificial Sequence: Synthetic peptide
YNRLAWY

SEQ ID NO: 1213 - protein, 10 aa, Artificial Sequence
  Description of Artificial Sequence: Synthetic peptide
LLISGATSLE

SEQ ID NO: 1214 - protein, 8 aa, Artificial Sequence
  Description of Artificial Sequence: Synthetic peptide
QQYWSFPR

SEQ ID NO: 1215 - protein, 9 aa, Artificial Sequence
  Description of Artificial Sequence: Synthetic peptide
GYSITSGYY

SEQ ID NO: 1216 - protein, 7 aa, Artificial Sequence
  Description of Artificial Sequence: Synthetic peptide
INYDGRN

SEQ ID NO: 1217 - protein, 13 aa, Artificial Sequence
  Description of Artificial Sequence: Synthetic peptide
ARDQGYSKFYFDY

SEQ ID NO: 1218 - protein, 6 aa, Artificial Sequence
  Description of Artificial Sequence: Synthetic peptide
EDIYNR

SEQ ID NO: 1219 - protein, 3 aa, Artificial Sequence
  Description of Artificial Sequence: Synthetic peptide
GAT

SEQ ID NO: 1220 - protein, 9 aa, Artificial Sequence
  Description of Artificial Sequence: Synthetic peptide
QQYWSFPRT

SEQ ID NO: 1221 - protein, 120 aa, Artificial Sequence
  Description of Artificial Sequence: Synthetic polypeptide
QVQLKESGPGLVKPSQSLSLTCSVTGYSITSGYYWNWIRQFPGNKLEWMGYINYDGRNNYNPSLRNRISITRDTSKNHFFLKLNSVTTEDTATYYCARDQGYSKFYFDYWGQGTTLTVSS

SEQ ID NO: 1222 - protein, 107 aa, Artificial Sequence
  Description of Artificial Sequence: Synthetic polypeptide
DIQMTQSSSSFSVSLGDRVTITCKASEDIYNRLAWYQQRPGNAPRLLISGATSLETGVPSRFSGSGSGKDYTLSITSLQTEDVANYYCQQYWSFPRTFGGGTKLEIK

SEQ ID NO: 1223 - protein, 450 aa, Artificial Sequence
  Description of Artificial Sequence: Synthetic polypeptide
QVQLKESGPGLVKPSQSLSLTCSVTGYSITSGYYWNWIRQFPGNKLEWMGYINYDGRNNYNPSLRNRISITRDTSKNHFFLKLNSVTTEDTATYYCARDQGYSKFYFDYWGQGTTLTVSSASTKGPSVFPLAPSSKSTSGGTAALGCLVKDYFPEPVTVSWNSGALTSGVHTFPAVLQSSGLYSLSSVVTVPSSSLGTQTYICNVNHKPSNTKVDKKVEPKSCDKTHTCPPCPAPELLGGPSVFLFPPKPKDTLMISRTPEVTCVVVDVSHEDPEVKFNWYVDGVEVHNAKTKPREEQYNSTYRVVSVLTVLHQDWLNGKEYKCKVSNKALPAPIEKTISKAKGQPREPQVYTLPPSREEMTKNQVSLTCLVKGFYPSDIAVEWESNGQPENNYKTTPPVLDSDGSFFLYSKLTVDKSRWQQGNVFSCSVMHEALHNHYTQKSLSLSPGK

SEQ ID NO: 1224 - protein, 214 aa, Artificial Sequence
  Description of Artificial Sequence: Synthetic polypeptide
DIQMTQSSSSFSVSLGDRVTITCKASEDIYNRLAWYQQRPGNAPRLLISGATSLETGVPSRFSGSGSGKDYTLSITSLQTEDVANYYCQQYWSFPRTFGGGTKLEIKRTVAAPSVFIFPPSDEQLKSGTASVVCLLNNFYPREAKVQWKVDNALQSGNSQESVTEQDSKDSTYSLSSTLTLSKADYEKHKVYACEVTHQGLSSPVTKSFNRGEC

SEQ ID NO: 1225 - protein, 5 aa, Artificial Sequence
  Description of Artificial Sequence: Synthetic peptide
AYYMH

SEQ ID NO: 1226 - protein, 17 aa, Artificial Sequence
  Description of Artificial Sequence: Synthetic peptide
EINPSAGGTTYNQKFKA

SEQ ID NO: 1227 - protein, 7 aa, Artificial Sequence
  Description of Artificial Sequence: Synthetic peptide
WTNPFDY

SEQ ID NO: 1228 - protein, 11 aa, Artificial Sequence
  Description of Artificial Sequence: Synthetic peptide
KASQNVGTAVA

SEQ ID NO: 1229 - protein, 7 aa, Artificial Sequence
  Description of Artificial Sequence: Synthetic peptide
SASYRYT

SEQ ID NO: 1230 - protein, 8 aa, Artificial Sequence
  Description of Artificial Sequence: Synthetic peptide
QQYNNYLT

SEQ ID NO: 1231 - protein, 7 aa, Artificial Sequence
  Description of Artificial Sequence: Synthetic peptide
GYSFTAY

SEQ ID NO: 1232 - protein, 6 aa, Artificial Sequence
  Description of Artificial Sequence: Synthetic peptide
NPSAGG

SEQ ID NO: 1233 - protein, 6 aa, Artificial Sequence
  Description of Artificial Sequence: Synthetic peptide
WTNPFD

SEQ ID NO: 1234 - protein, 7 aa, Artificial Sequence
  Description of Artificial Sequence: Synthetic peptide
SQNVGTA

SEQ ID NO: 1235 - protein, 3 aa, Artificial Sequence
  Description of Artificial Sequence: Synthetic peptide
SAS

SEQ ID NO: 1236 - protein, 5 aa, Artificial Sequence
  Description of Artificial Sequence: Synthetic peptide
YNNYL

SEQ ID NO: 1237 - protein, 10 aa, Artificial Sequence
  Description of Artificial Sequence: Synthetic peptide
GYSFTAYYMH

SEQ ID NO: 1238 - protein, 10 aa, Artificial Sequence
  Description of Artificial Sequence: Synthetic peptide
EINPSAGGTT

SEQ ID NO: 1239 - protein, 7 aa, Artificial Sequence
  Description of Artificial Sequence: Synthetic peptide
WTNPFDY

SEQ ID NO: 1240 - protein, 11 aa, Artificial Sequence
  Description of Artificial Sequence: Synthetic peptide
KASQNVGTAVA

SEQ ID NO: 1241 - protein, 7 aa, Artificial Sequence
  Description of Artificial Sequence: Synthetic peptide
SASYRYT

SEQ ID NO: 1242 - protein, 8 aa, Artificial Sequence
  Description of Artificial Sequence: Synthetic peptide
QQYNNYLT

SEQ ID NO: 1243 - protein, 6 aa, Artificial Sequence
  Description of Artificial Sequence: Synthetic peptide
TAYYMH

SEQ ID NO: 1244 - protein, 13 aa, Artificial Sequence
  Description of Artificial Sequence: Synthetic peptide
WIGEINPSAGGTT

SEQ ID NO: 1245 - protein, 8 aa, Artificial Sequence
  Description of Artificial Sequence: Synthetic peptide
ARWTNPFD

SEQ ID NO: 1246 - protein, 7 aa, Artificial Sequence
  Description of Artificial Sequence: Synthetic peptide
GTAVAWY

SEQ ID NO: 1247 - protein, 10 aa, Artificial Sequence
  Description of Artificial Sequence: Synthetic peptide
LLIYSASYRY

SEQ ID NO: 1248 - protein, 7 aa, Artificial Sequence
  Description of Artificial Sequence: Synthetic peptide
QQYNNYL

SEQ ID NO: 1249 - protein, 8 aa, Artificial Sequence
  Description of Artificial Sequence: Synthetic peptide
GYSFTAYY

SEQ ID NO: 1250 - protein, 8 aa, Artificial Sequence
  Description of Artificial Sequence: Synthetic peptide
INPSAGGT

SEQ ID NO: 1251 - protein, 9 aa, Artificial Sequence
  Description of Artificial Sequence: Synthetic peptide
ARWTNPFDY

SEQ ID NO: 1252 - protein, 6 aa, Artificial Sequence
  Description of Artificial Sequence: Synthetic peptide
QNVGTA

SEQ ID NO: 1253 - protein, 3 aa, Artificial Sequence
  Description of Artificial Sequence: Synthetic peptide
SAS

SEQ ID NO: 1254 - protein, 8 aa, Artificial Sequence
  Description of Artificial Sequence: Synthetic peptide
QQYNNYLT

SEQ ID NO: 1255 - protein, 116 aa, Artificial Sequence
  Description of Artificial Sequence: Synthetic polypeptide
QVQLKESGPELKKPGETVKISCKASGYSFTAYYMHWVKQSPEKSLEWIGEINPSAGGTTYNQKFKAKATLTVDKSSSTAFIQLKSLTSEDSAVYYCARWTNPFDYWGQGTTLTVSS

SEQ ID NO: 1256 - protein, 106 aa, Artificial Sequence
  Description of Artificial Sequence: Synthetic polypeptide
DIVMTQSQKFMSTTVGDRVSITCKASQNVGTAVAWYQQKPGQSPKLLIYSASYRYTGVPDRFTGSGSGTHFTLTISNIQSEDLADYFCQQYNNYLTFGSGTKLEIK

SEQ ID NO: 1257 - protein, 446 aa, Artificial Sequence
  Description of Artificial Sequence: Synthetic polypeptide
QVQLKESGPELKKPGETVKISCKASGYSFTAYYMHWVKQSPEKSLEWIGEINPSAGGTTYNQKFKAKATLTVDKSSSTAFIQLKSLTSEDSAVYYCARWTNPFDYWGQGTTLTVSSASTKGPSVFPLAPSSKSTSGGTAALGCLVKDYFPEPVTVSWNSGALTSGVHTFPAVLQSSGLYSLSSVVTVPSSSLGTQTYICNVNHKPSNTKVDKKVEPKSCDKTHTCPPCPAPELLGGPSVFLFPPKPKDTLMISRTPEVTCVVVDVSHEDPEVKFNWYVDGVEVHNAKTKPREEQYNSTYRVVSVLTVLHQDWLNGKEYKCKVSNKALPAPIEKTISKAKGQPREPQVYTLPPSREEMTKNQVSLTCLVKGFYPSDIAVEWESNGQPENNYKTTPPVLDSDGSFFLYSKLTVDKSRWQQGNVFSCSVMHEALHNHYTQKSLSLSPGK

SEQ ID NO: 1258 - protein, 213 aa, Artificial Sequence
  Description of Artificial Sequence: Synthetic polypeptide
DIVMTQSQKFMSTTVGDRVSITCKASQNVGTAVAWYQQKPGQSPKLLIYSASYRYTGVPDRFTGSGSGTHFTLTISNIQSEDLADYFCQQYNNYLTFGSGTKLEIKRTVAAPSVFIFPPSDEQLKSGTASVVCLLNNFYPREAKVQWKVDNALQSGNSQESVTEQDSKDSTYSLSSTLTLSKADYEKHKVYACEVTHQGLSSPVTKSFNRGEC

SEQ ID NO: 1259 - protein, 5 aa, Artificial Sequence
  Description of Artificial Sequence: Synthetic peptide
SYWIN

SEQ ID NO: 1260 - protein, 17 aa, Artificial Sequence
  Description of Artificial Sequence: Synthetic peptide
NIYPGSSSTNYNEKFKS

SEQ ID NO: 1261 - protein, 13 aa, Artificial Sequence
  Description of Artificial Sequence: Synthetic peptide
ELGPYYRYSAMVY

SEQ ID NO: 1262 - protein, 11 aa, Artificial Sequence
  Description of Artificial Sequence: Synthetic peptide
KASQNVGTAVA

SEQ ID NO: 1263 - protein, 7 aa, Artificial Sequence
  Description of Artificial Sequence: Synthetic peptide
SASNRYT

SEQ ID NO: 1264 - protein, 9 aa, Artificial Sequence
  Description of Artificial Sequence: Synthetic peptide
QQYSSYPFT

SEQ ID NO: 1265 - protein, 7 aa, Artificial Sequence
  Description of Artificial Sequence: Synthetic peptide
GYTFTSY

SEQ ID NO: 1266 - protein, 6 aa, Artificial Sequence
  Description of Artificial Sequence: Synthetic peptide
YPGSSS

SEQ ID NO: 1267 - protein, 12 aa, Artificial Sequence
  Description of Artificial Sequence: Synthetic peptide
ELGPYYRYSAMV

SEQ ID NO: 1268 - protein, 7 aa, Artificial Sequence
  Description of Artificial Sequence: Synthetic peptide
SQNVGTA

SEQ ID NO: 1269 - protein, 3 aa, Artificial Sequence
  Description of Artificial Sequence: Synthetic peptide
SAS

SEQ ID NO: 1270 - protein, 6 aa, Artificial Sequence
  Description of Artificial Sequence: Synthetic peptide
YSSYPF

SEQ ID NO: 1271 - protein, 10 aa, Artificial Sequence
  Description of Artificial Sequence: Synthetic peptide
GYTFTSYWIN

SEQ ID NO: 1272 - protein, 10 aa, Artificial Sequence
  Description of Artificial Sequence: Synthetic peptide
NIYPGSSSTN

SEQ ID NO: 1273 - protein, 13 aa, Artificial Sequence
  Description of Artificial Sequence: Synthetic peptide
ELGPYYRYSAMVY

SEQ ID NO: 1274 - protein, 11 aa, Artificial Sequence
  Description of Artificial Sequence: Synthetic peptide
KASQNVGTAVA

SEQ ID NO: 1275 - protein, 7 aa, Artificial Sequence
  Description of Artificial Sequence: Synthetic peptide
SASNRYT

SEQ ID NO: 1276 - protein, 9 aa, Artificial Sequence
  Description of Artificial Sequence: Synthetic peptide
QQYSSYPFT

SEQ ID NO: 1277 - protein, 6 aa, Artificial Sequence
  Description of Artificial Sequence: Synthetic peptide
TSYWIN

SEQ ID NO: 1278 - protein, 13 aa, Artificial Sequence
  Description of Artificial Sequence: Synthetic peptide
WIGNIYPGSSSTN

SEQ ID NO: 1279 - protein, 14 aa, Artificial Sequence
  Description of Artificial Sequence: Synthetic peptide
ARELGPYYRYSAMV

SEQ ID NO: 1280 - protein, 7 aa, Artificial Sequence
  Description of Artificial Sequence: Synthetic peptide
GTAVAWY

SEQ ID NO: 1281 - protein, 10 aa, Artificial Sequence
  Description of Artificial Sequence: Synthetic peptide
LLIYSASNRY

SEQ ID NO: 1282 - protein, 8 aa, Artificial Sequence
  Description of Artificial Sequence: Synthetic peptide
QQYSSYPF

SEQ ID NO: 1283 - protein, 8 aa, Artificial Sequence
  Description of Artificial Sequence: Synthetic peptide
GYTFTSYW

SEQ ID NO: 1284 - protein, 8 aa, Artificial Sequence
  Description of Artificial Sequence: Synthetic peptide
IYPGSSST

SEQ ID NO: 1285 - protein, 15 aa, Artificial Sequence
  Description of Artificial Sequence: Synthetic peptide
ARELGPYYRYSAMVY

SEQ ID NO: 1286 - protein, 6 aa, Artificial Sequence
  Description of Artificial Sequence: Synthetic peptide
QNVGTA

SEQ ID NO: 1287 - protein, 3 aa, Artificial Sequence
  Description of Artificial Sequence: Synthetic peptide
SAS

SEQ ID NO: 1288 - protein, 9 aa, Artificial Sequence
  Description of Artificial Sequence: Synthetic peptide
QQYSSYPFT

SEQ ID NO: 1289 - protein, 122 aa, Artificial Sequence
  Description of Artificial Sequence: Synthetic polypeptide
QVQLQQPGAELVKPGASVKLSCKASGYTFTSYWINWVKQRPGQGLEWIGNIYPGSSSTNYNEKFKSKATLTVDTSSSAAYMQLSSLTSGDSAVYYCARELGPYYRYSAMVYWGQGTTVTVSS

SEQ ID NO: 1290 - protein, 107 aa, Artificial Sequence
  Description of Artificial Sequence: Synthetic polypeptide
DIVMTQSQKFMSTTVGDRVSITCKASQNVGTAVAWYQQKPGQSPKLLIYSASNRYTGVPDRFTGSGSGTDFTLTISNMQSEDLADYFCQQYSSYPFTFGSGTKLEIK

SEQ ID NO: 1291 - protein, 452 aa, Artificial Sequence
  Description of Artificial Sequence: Synthetic polypeptide
QVQLQQPGAELVKPGASVKLSCKASGYTFTSYWINWVKQRPGQGLEWIGNIYPGSSSTNYNEKFKSKATLTVDTSSSAAYMQLSSLTSGDSAVYYCARELGPYYRYSAMVYWGQGTTVTVSSASTKGPSVFPLAPSSKSTSGGTAALGCLVKDYFPEPVTVSWNSGALTSGVHTFPAVLQSSGLYSLSSVVTVPSSSLGTQTYICNVNHKPSNTKVDKKVEPKSCDKTHTCPPCPAPELLGGPSVFLFPPKPKDTLMISRTPEVTCVVVDVSHEDPEVKFNWYVDGVEVHNAKTKPREEQYNSTYRVVSVLTVLHQDWLNGKEYKCKVSNKALPAPIEKTISKAKGQPREPQVYTLPPSREEMTKNQVSLTCLVKGFYPSDIAVEWESNGQPENNYKTTPPVLDSDGSFFLYSKLTVDKSRWQQGNVFSCSVMHEALHNHYTQKSLSLSPGK

SEQ ID NO: 1292 - protein, 214 aa, Artificial Sequence
  Description of Artificial Sequence: Synthetic polypeptide
DIVMTQSQKFMSTTVGDRVSITCKASQNVGTAVAWYQQKPGQSPKLLIYSASNRYTGVPDRFTGSGSGTDFTLTISNMQSEDLADYFCQQYSSYPFTFGSGTKLEIKRTVAAPSVFIFPPSDEQLKSGTASVVCLLNNFYPREAKVQWKVDNALQSGNSQESVTEQDSKDSTYSLSSTLTLSKADYEKHKVYACEVTHQGLSSPVTKSFNRGEC

SEQ ID NO: 1293 - protein, 5 aa, Artificial Sequence
  Description of Artificial Sequence: Synthetic peptide
NYWMH

SEQ ID NO: 1294 - protein, 17 aa, Artificial Sequence
  Description of Artificial Sequence: Synthetic peptide
NIDPSDSETHYNQKFKD

SEQ ID NO: 1295 - protein, 8 aa, Artificial Sequence
  Description of Artificial Sequence: Synthetic peptide
GLTGTGHY

SEQ ID NO: 1296 - protein, 11 aa, Artificial Sequence
  Description of Artificial Sequence: Synthetic peptide
RASQDINIYLN

SEQ ID NO: 1297 - protein, 7 aa, Artificial Sequence
  Description of Artificial Sequence: Synthetic peptide
HTSRLHS

SEQ ID NO: 1298 - protein, 9 aa, Artificial Sequence
  Description of Artificial Sequence: Synthetic peptide
QQDNTLPYT

SEQ ID NO: 1299 - protein, 7 aa, Artificial Sequence
  Description of Artificial Sequence: Synthetic peptide
GYTFTNY

SEQ ID NO: 1300 - protein, 6 aa, Artificial Sequence
  Description of Artificial Sequence: Synthetic peptide
DPSDSE

SEQ ID NO: 1301 - protein, 7 aa, Artificial Sequence
  Description of Artificial Sequence: Synthetic peptide
GLTGTGH

SEQ ID NO: 1302 - protein, 7 aa, Artificial Sequence
  Description of Artificial Sequence: Synthetic peptide
SQDINIY

SEQ ID NO: 1303 - protein, 3 aa, Artificial Sequence
  Description of Artificial Sequence: Synthetic peptide
HTS

SEQ ID NO: 1304 - protein, 6 aa, Artificial Sequence
  Description of Artificial Sequence: Synthetic peptide
DNTLPY

SEQ ID NO: 1305 - protein, 10 aa, Artificial Sequence
  Description of Artificial Sequence: Synthetic peptide
GYTFTNYWMH

SEQ ID NO: 1306 - protein, 10 aa, Artificial Sequence
  Description of Artificial Sequence: Synthetic peptide
NIDPSDSETH

SEQ ID NO: 1307 - protein, 8 aa, Artificial Sequence
  Description of Artificial Sequence: Synthetic peptide
GLTGTGHY

SEQ ID NO: 1308 - protein, 11 aa, Artificial Sequence
  Description of Artificial Sequence: Synthetic peptide
RASQDINIYLN

SEQ ID NO: 1309 - protein, 7 aa, Artificial Sequence
  Description of Artificial Sequence: Synthetic peptide
HTSRLHS

SEQ ID NO: 1310 - protein, 9 aa, Artificial Sequence
  Description of Artificial Sequence: Synthetic peptide
QQDNTLPYT

SEQ ID NO: 1311 - protein, 6 aa, Artificial Sequence
  Description of Artificial Sequence: Synthetic peptide
TNYWMH

SEQ ID NO: 1312 - protein, 13 aa, Artificial Sequence
  Description of Artificial Sequence: Synthetic peptide
WIGNIDPSDSETH

SEQ ID NO: 1313 - protein, 9 aa, Artificial Sequence
  Description of Artificial Sequence: Synthetic peptide
ASGLTGTGH

SEQ ID NO: 1314 - protein, 7 aa, Artificial Sequence
  Description of Artificial Sequence: Synthetic peptide
NIYLNWY

SEQ ID NO: 1315 - protein, 10 aa, Artificial Sequence
  Description of Artificial Sequence: Synthetic peptide
CLIYHTSRLH

SEQ ID NO: 1316 - protein, 8 aa, Artificial Sequence
  Description of Artificial Sequence: Synthetic peptide
QQDNTLPY

SEQ ID NO: 1317 - protein, 8 aa, Artificial Sequence
  Description of Artificial Sequence: Synthetic peptide
GYTFTNYW

SEQ ID NO: 1318 - protein, 8 aa, Artificial Sequence
  Description of Artificial Sequence: Synthetic peptide
IDPSDSET

SEQ ID NO: 1319 - protein, 10 aa, Artificial Sequence
  Description of Artificial Sequence: Synthetic peptide
ASGLTGTGHY

SEQ ID NO: 1320 - protein, 6 aa, Artificial Sequence
  Description of Artificial Sequence: Synthetic peptide
QDINIY

SEQ ID NO: 1321 - protein, 3 aa, Artificial Sequence
  Description of Artificial Sequence: Synthetic peptide
HTS

SEQ ID NO: 1322 - protein, 9 aa, Artificial Sequence
  Description of Artificial Sequence: Synthetic peptide
QQDNTLPYT

SEQ ID NO: 1323 - protein, 117 aa, Artificial Sequence
  Description of Artificial Sequence: Synthetic polypeptide
EVKLVESGAELVKPGASVKLSCKASGYTFTNYWMHWVKQRPGQGLEWIGNIDPSDSETHYNQKFKDKATLTVDKSSSTAYMQLSSLTSEDSAVYYCASGLTGTGHYWGQGTTLTVSS

SEQ ID NO: 1324 - protein, 107 aa, Artificial Sequence
  Description of Artificial Sequence: Synthetic polypeptide
DIQMTQTTSSLSASLGDRVTITCRASQDINIYLNWYQQKPEGSIKCLIYHTSRLHSGVPSRFSGSGSGTDYSLTISNLEQEDIATYFCQQDNTLPYTFGSGTKLEIK

SEQ ID NO: 1325 - protein, 447 aa, Artificial Sequence
  Description of Artificial Sequence: Synthetic polypeptide
EVKLVESGAELVKPGASVKLSCKASGYTFTNYWMHWVKQRPGQGLEWIGNIDPSDSETHYNQKFKDKATLTVDKSSSTAYMQLSSLTSEDSAVYYCASGLTGTGHYWGQGTTLTVSSASTKGPSVFPLAPSSKSTSGGTAALGCLVKDYFPEPVTVSWNSGALTSGVHTFPAVLQSSGLYSLSSVVTVPSSSLGTQTYICNVNHKPSNTKVDKKVEPKSCDKTHTCPPCPAPELLGGPSVFLFPPKPKDTLMISRTPEVTCVVVDVSHEDPEVKFNWYVDGVEVHNAKTKPREEQYNSTYRVVSVLTVLHQDWLNGKEYKCKVSNKALPAPIEKTISKAKGQPREPQVYTLPPSREEMTKNQVSLTCLVKGFYPSDIAVEWESNGQPENNYKTTPPVLDSDGSFFLYSKLTVDKSRWQQGNVFSCSVMHEALHNHYTQKSLSLSPGK

SEQ ID NO: 1326 - protein, 214 aa, Artificial Sequence
  Description of Artificial Sequence: Synthetic polypeptide
DIQMTQTTSSLSASLGDRVTITCRASQDINIYLNWYQQKPEGSIKCLIYHTSRLHSGVPSRFSGSGSGTDYSLTISNLEQEDIATYFCQQDNTLPYTFGSGTKLEIKRTVAAPSVFIFPPSDEQLKSGTASVVCLLNNFYPREAKVQWKVDNALQSGNSQESVTEQDSKDSTYSLSSTLTLSKADYEKHKVYACEVTHQGLSSPVTKSFNRGEC

SEQ ID NO: 1327 - protein, 5 aa, Artificial Sequence
  Description of Artificial Sequence: Synthetic peptide
DYSMD

SEQ ID NO: 1328 - protein, 17 aa, Artificial Sequence
  Description of Artificial Sequence: Synthetic peptide
YIYTYSGGAGYNRKFKS

SEQ ID NO: 1329 - protein, 9 aa, Artificial Sequence
  Description of Artificial Sequence: Synthetic peptide
DSSDYEFAY

SEQ ID NO: 1330 - protein, 11 aa, Artificial Sequence
  Description of Artificial Sequence: Synthetic peptide
KASQDIKSYLS

SEQ ID NO: 1331 - protein, 7 aa, Artificial Sequence
  Description of Artificial Sequence: Synthetic peptide
RANRLVD

SEQ ID NO: 1332 - protein, 8 aa, Artificial Sequence
  Description of Artificial Sequence: Synthetic peptide
LQYDEFRT

SEQ ID NO: 1333 - protein, 7 aa, Artificial Sequence
  Description of Artificial Sequence: Synthetic peptide
GYTFTDY

SEQ ID NO: 1334 - protein, 6 aa, Artificial Sequence
  Description of Artificial Sequence: Synthetic peptide
YTYSGG

SEQ ID NO: 1335 - protein, 8 aa, Artificial Sequence
  Description of Artificial Sequence: Synthetic peptide
DSSDYEFA

SEQ ID NO: 1336 - protein, 7 aa, Artificial Sequence
  Description of Artificial Sequence: Synthetic peptide
SQDIKSY

SEQ ID NO: 1337 - protein, 3 aa, Artificial Sequence
  Description of Artificial Sequence: Synthetic peptide
RAN

SEQ ID NO: 1338 - protein, 5 aa, Artificial Sequence
  Description of Artificial Sequence: Synthetic peptide
YDEFR

SEQ ID NO: 1339 - protein, 10 aa, Artificial Sequence
  Description of Artificial Sequence: Synthetic peptide
GYTFTDYSMD

SEQ ID NO: 1340 - protein, 10 aa, Artificial Sequence
  Description of Artificial Sequence: Synthetic peptide
YIYTYSGGAG

SEQ ID NO: 1341 - protein, 9 aa, Artificial Sequence
  Description of Artificial Sequence: Synthetic peptide
DSSDYEFAY

SEQ ID NO: 1342 - protein, 11 aa, Artificial Sequence
  Description of Artificial Sequence: Synthetic peptide
KASQDIKSYLS

SEQ ID NO: 1343 - protein, 7 aa, Artificial Sequence
  Description of Artificial Sequence: Synthetic peptide
RANRLVD

SEQ ID NO: 1344 - protein, 8 aa, Artificial Sequence
  Description of Artificial Sequence: Synthetic peptide
LQYDEFRT

SEQ ID NO: 1345 - protein, 6 aa, Artificial Sequence
  Description of Artificial Sequence: Synthetic peptide
TDYSMD

SEQ ID NO: 1346 - protein, 13 aa, Artificial Sequence
  Description of Artificial Sequence: Synthetic peptide
WIGYIYTYSGGAG

SEQ ID NO: 1347 - protein, 10 aa, Artificial Sequence
  Description of Artificial Sequence: Synthetic peptide
ARDSSDYEFA

SEQ ID NO: 1348 - protein, 7 aa, Artificial Sequence
  Description of Artificial Sequence: Synthetic peptide
KSYLSWF

SEQ ID NO: 1349 - protein, 10 aa, Artificial Sequence
  Description of Artificial Sequence: Synthetic peptide
TLIYRANRLV

SEQ ID NO: 1350 - protein, 7 aa, Artificial Sequence
  Description of Artificial Sequence: Synthetic peptide
LQYDEFR

SEQ ID NO: 1351 - protein, 8 aa, Artificial Sequence
  Description of Artificial Sequence: Synthetic peptide
GYTFTDYS

SEQ ID NO: 1352 - protein, 8 aa, Artificial Sequence
  Description of Artificial Sequence: Synthetic peptide
IYTYSGGA

SEQ ID NO: 1353 - protein, 11 aa, Artificial Sequence
  Description of Artificial Sequence: Synthetic peptide
ARDSSDYEFAY

SEQ ID NO: 1354 - protein, 6 aa, Artificial Sequence
  Description of Artificial Sequence: Synthetic peptide
QDIKSY

SEQ ID NO: 1355 - protein, 3 aa, Artificial Sequence
  Description of Artificial Sequence: Synthetic peptide
RAN

SEQ ID NO: 1356 - protein, 8 aa, Artificial Sequence
  Description of Artificial Sequence: Synthetic peptide
LQYDEFRT

SEQ ID NO: 1357 - protein, 118 aa, Artificial Sequence
  Description of Artificial Sequence: Synthetic polypeptide
EFQLQQSGPELVKPGASLKISCKASGYTFTDYSMDWVKQSHGKTLEWIGYIYTYSGGAGYNRKFKSKATLTVDKSSSTAYLELHSLTSDDSAVYYCARDSSDYEFAYWGQGTLVTVSA

SEQ ID NO: 1358 - protein, 106 aa, Artificial Sequence
  Description of Artificial Sequence: Synthetic polypeptide
DIKMTQSPSSMCPSLGERVTITCKASQDIKSYLSWFQQKPGKSPKTLIYRANRLVDGVPSRFSGSGSGQDYSLTISSLEYEDMGIYYCLQYDEFRTFGGGTKLEIK

SEQ ID NO: 1359 - protein, 448 aa, Artificial Sequence
  Description of Artificial Sequence: Synthetic polypeptide
EFQLQQSGPELVKPGASLKISCKASGYTFTDYSMDWVKQSHGKTLEWIGYIYTYSGGAGYNRKFKSKATLTVDKSSSTAYLELHSLTSDDSAVYYCARDSSDYEFAYWGQGTLVTVSAASTKGPSVFPLAPSSKSTSGGTAALGCLVKDYFPEPVTVSWNSGALTSGVHTFPAVLQSSGLYSLSSVVTVPSSSLGTQTYICNVNHKPSNTKVDKKVEPKSCDKTHTCPPCPAPELLGGPSVFLFPPKPKDTLMISRTPEVTCVVVDVSHEDPEVKFNWYVDGVEVHNAKTKPREEQYNSTYRVVSVLTVLHQDWLNGKEYKCKVSNKALPAPIEKTISKAKGQPREPQVYTLPPSREEMTKNQVSLTCLVKGFYPSDIAVEWESNGQPENNYKTTPPVLDSDGSFFLYSKLTVDKSRWQQGNVFSCSVMHEALHNHYTQKSLSLSPGK

SEQ ID NO: 1360 - protein, 213 aa, Artificial Sequence
  Description of Artificial Sequence: Synthetic polypeptide
DIKMTQSPSSMCPSLGERVTITCKASQDIKSYLSWFQQKPGKSPKTLIYRANRLVDGVPSRFSGSGSGQDYSLTISSLEYEDMGIYYCLQYDEFRTFGGGTKLEIKRTVAAPSVFIFPPSDEQLKSGTASVVCLLNNFYPREAKVQWKVDNALQSGNSQESVTEQDSKDSTYSLSSTLTLSKADYEKHKVYACEVTHQGLSSPVTKSFNRGEC

SEQ ID NO: 1361 - protein, 7 aa, Artificial Sequence
  Description of Artificial Sequence: Synthetic peptide
TSGMGVS

SEQ ID NO: 1362 - protein, 16 aa, Artificial Sequence
  Description of Artificial Sequence: Synthetic peptide
HIFWDDDKRYNPSLKS

SEQ ID NO: 1363 - protein, 12 aa, Artificial Sequence
  Description of Artificial Sequence: Synthetic peptide
RDGYGDYAYFDV

SEQ ID NO: 1364 - protein, 11 aa, Artificial Sequence
  Description of Artificial Sequence: Synthetic peptide
RASENIYSDLA

SEQ ID NO: 1365 - protein, 7 aa, Artificial Sequence
  Description of Artificial Sequence: Synthetic peptide
AATILTD

SEQ ID NO: 1366 - protein, 9 aa, Artificial Sequence
  Description of Artificial Sequence: Synthetic peptide
QHFWGTPWT

SEQ ID NO: 1367 - protein, 9 aa, Artificial Sequence
  Description of Artificial Sequence: Synthetic peptide
GFSLNTSGM

SEQ ID NO: 1368 - protein, 5 aa, Artificial Sequence
  Description of Artificial Sequence: Synthetic peptide
FWDDD

SEQ ID NO: 1369 - protein, 11 aa, Artificial Sequence
  Description of Artificial Sequence: Synthetic peptide
RDGYGDYAYFD

SEQ ID NO: 1370 - protein, 7 aa, Artificial Sequence
  Description of Artificial Sequence: Synthetic peptide
SENIYSD

SEQ ID NO: 1371 - protein, 3 aa, Artificial Sequence
  Description of Artificial Sequence: Synthetic peptide
AAT

SEQ ID NO: 1372 - protein, 6 aa, Artificial Sequence
  Description of Artificial Sequence: Synthetic peptide
FWGTPW

SEQ ID NO: 1373 - protein, 12 aa, Artificial Sequence
  Description of Artificial Sequence: Synthetic peptide
GFSLNTSGMGVS

SEQ ID NO: 1374 - protein, 9 aa, Artificial Sequence
  Description of Artificial Sequence: Synthetic peptide
HIFWDDDKR

SEQ ID NO: 1375 - protein, 12 aa, Artificial Sequence
  Description of Artificial Sequence: Synthetic peptide
RDGYGDYAYFDV

SEQ ID NO: 1376 - protein, 11 aa, Artificial Sequence
  Description of Artificial Sequence: Synthetic peptide
RASENIYSDLA

SEQ ID NO: 1377 - protein, 7 aa, Artificial Sequence
  Description of Artificial Sequence: Synthetic peptide
AATILTD

SEQ ID NO: 1378 - protein, 9 aa, Artificial Sequence
  Description of Artificial Sequence: Synthetic peptide
QHFWGTPWT

SEQ ID NO: 1379 - protein, 8 aa, Artificial Sequence
  Description of Artificial Sequence: Synthetic peptide
NTSGMGVS

SEQ ID NO: 1380 - protein, 12 aa, Artificial Sequence
  Description of Artificial Sequence: Synthetic peptide
WLAHIFWDDDKR

SEQ ID NO: 1381 - protein, 13 aa, Artificial Sequence
  Description of Artificial Sequence: Synthetic peptide
ARRDGYGDYAYFD

SEQ ID NO: 1382 - protein, 7 aa, Artificial Sequence
  Description of Artificial Sequence: Synthetic peptide
YSDLAWY

SEQ ID NO: 1383 - protein, 10 aa, Artificial Sequence
  Description of Artificial Sequence: Synthetic peptide
LLVYAATILT

SEQ ID NO: 1384 - protein, 8 aa, Artificial Sequence
  Description of Artificial Sequence: Synthetic peptide
QHFWGTPW

SEQ ID NO: 1385 - protein, 10 aa, Artificial Sequence
  Description of Artificial Sequence: Synthetic peptide
GFSLNTSGMG

SEQ ID NO: 1386 - protein, 7 aa, Artificial Sequence
  Description of Artificial Sequence: Synthetic peptide
IFWDDDK

SEQ ID NO: 1387 - protein, 14 aa, Artificial Sequence
  Description of Artificial Sequence: Synthetic peptide
ARRDGYGDYAYFDV

SEQ ID NO: 1388 - protein, 6 aa, Artificial Sequence
  Description of Artificial Sequence: Synthetic peptide
ENIYSD

SEQ ID NO: 1389 - protein, 3 aa, Artificial Sequence
  Description of Artificial Sequence: Synthetic peptide
AAT

SEQ ID NO: 1390 - protein, 9 aa, Artificial Sequence
  Description of Artificial Sequence: Synthetic peptide
QHFWGTPWT

SEQ ID NO: 1391 - protein, 122 aa, Artificial Sequence
  Description of Artificial Sequence: Synthetic polypeptide
QVTLKESGPGILQPSQTLSLTCSFSGFSLNTSGMGVSWIRKPSGKGLEWLAHIFWDDDKRYNPSLKSRLTISKDTSSNQVFLMITSVDTADTATYYCARRDGYGDYAYFDVWGAGTLVTVSA

SEQ ID NO: 1392 - protein, 107 aa, Artificial Sequence
  Description of Artificial Sequence: Synthetic polypeptide
DIQMTQSPASLSVSVGETVTITCRASENIYSDLAWYQQKQGKSPQLLVYAATILTDGVPSRFSGSGSGTQYSLKINSLQSEDFGNYYCQHFWGTPWTFGDGTRLEIK

SEQ ID NO: 1393 - protein, 452 aa, Artificial Sequence
  Description of Artificial Sequence: Synthetic polypeptide
QVTLKESGPGILQPSQTLSLTCSFSGFSLNTSGMGVSWIRKPSGKGLEWLAHIFWDDDKRYNPSLKSRLTISKDTSSNQVFLMITSVDTADTATYYCARRDGYGDYAYFDVWGAGTLVTVSAASTKGPSVFPLAPSSKSTSGGTAALGCLVKDYFPEPVTVSWNSGALTSGVHTFPAVLQSSGLYSLSSVVTVPSSSLGTQTYICNVNHKPSNTKVDKKVEPKSCDKTHTCPPCPAPELLGGPSVFLFPPKPKDTLMISRTPEVTCVVVDVSHEDPEVKFNWYVDGVEVHNAKTKPREEQYNSTYRVVSVLTVLHQDWLNGKEYKCKVSNKALPAPIEKTISKAKGQPREPQVYTLPPSREEMTKNQVSLTCLVKGFYPSDIAVEWESNGQPENNYKTTPPVLDSDGSFFLYSKLTVDKSRWQQGNVFSCSVMHEALHNHYTQKSLSLSPGK

SEQ ID NO: 1394 - protein, 214 aa, Artificial Sequence
  Description of Artificial Sequence: Synthetic polypeptide
DIQMTQSPASLSVSVGETVTITCRASENIYSDLAWYQQKQGKSPQLLVYAATILTDGVPSRFSGSGSGTQYSLKINSLQSEDFGNYYCQHFWGTPWTFGDGTRLEIKRTVAAPSVFIFPPSDEQLKSGTASVVCLLNNFYPREAKVQWKVDNALQSGNSQESVTEQDSKDSTYSLSSTLTLSKADYEKHKVYACEVTHQGLSSPVTKSFNRGEC

SEQ ID NO: 1395 - protein, 5 aa, Artificial Sequence
  Description of Artificial Sequence: Synthetic peptide
SHWIH

SEQ ID NO: 1396 - protein, 17 aa, Artificial Sequence
  Description of Artificial Sequence: Synthetic peptide
NIYPGSSSTNYNEKFKR

SEQ ID NO: 1397 - protein, 12 aa, Artificial Sequence
  Description of Artificial Sequence: Synthetic peptide
HSPGHRDYAMDY

SEQ ID NO: 1398 - protein, 11 aa, Artificial Sequence
  Description of Artificial Sequence: Synthetic peptide
KASQNVGTAVA

SEQ ID NO: 1399 - protein, 7 aa, Artificial Sequence
  Description of Artificial Sequence: Synthetic peptide
SASNRYT

SEQ ID NO: 1400 - protein, 9 aa, Artificial Sequence
  Description of Artificial Sequence: Synthetic peptide
QQYSTYPLT

SEQ ID NO: 1401 - protein, 7 aa, Artificial Sequence
  Description of Artificial Sequence: Synthetic peptide
GYTSTSH

SEQ ID NO: 1402 - protein, 6 aa, Artificial Sequence
  Description of Artificial Sequence: Synthetic peptide
YPGSSS

SEQ ID NO: 1403 - protein, 11 aa, Artificial Sequence
  Description of Artificial Sequence: Synthetic peptide
HSPGHRDYAMD

SEQ ID NO: 1404 - protein, 7 aa, Artificial Sequence
  Description of Artificial Sequence: Synthetic peptide
SQNVGTA

SEQ ID NO: 1405 - protein, 3 aa, Artificial Sequence
  Description of Artificial Sequence: Synthetic peptide
SAS

SEQ ID NO: 1406 - protein, 6 aa, Artificial Sequence
  Description of Artificial Sequence: Synthetic peptide
YSTYPL

SEQ ID NO: 1407 - protein, 10 aa, Artificial Sequence
  Description of Artificial Sequence: Synthetic peptide
GYTSTSHWIH

SEQ ID NO: 1408 - protein, 10 aa, Artificial Sequence
  Description of Artificial Sequence: Synthetic peptide
NIYPGSSSTN

SEQ ID NO: 1409 - protein, 12 aa, Artificial Sequence
  Description of Artificial Sequence: Synthetic peptide
HSPGHRDYAMDY

SEQ ID NO: 1410 - protein, 11 aa, Artificial Sequence
  Description of Artificial Sequence: Synthetic peptide
KASQNVGTAVA

SEQ ID NO: 1411 - protein, 7 aa, Artificial Sequence
  Description of Artificial Sequence: Synthetic peptide
SASNRYT

SEQ ID NO: 1412 - protein, 9 aa, Artificial Sequence
  Description of Artificial Sequence: Synthetic peptide
QQYSTYPLT

SEQ ID NO: 1413 - protein, 6 aa, Artificial Sequence
  Description of Artificial Sequence: Synthetic peptide
TSHWIH

SEQ ID NO: 1414 - protein, 13 aa, Artificial Sequence
  Description of Artificial Sequence: Synthetic peptide
WIGNIYPGSSSTN

SEQ ID NO: 1415 - protein, 13 aa, Artificial Sequence
  Description of Artificial Sequence: Synthetic peptide
ARHSPGHRDYAMD

SEQ ID NO: 1416 - protein, 7 aa, Artificial Sequence
  Description of Artificial Sequence: Synthetic peptide
GTAVAWY

SEQ ID NO: 1417 - protein, 10 aa, Artificial Sequence
  Description of Artificial Sequence: Synthetic peptide
LLIASASNRY

SEQ ID NO: 1418 - protein, 8 aa, Artificial Sequence
  Description of Artificial Sequence: Synthetic peptide
QQYSTYPL

SEQ ID NO: 1419 - protein, 8 aa, Artificial Sequence
  Description of Artificial Sequence: Synthetic peptide
GYTSTSHW

SEQ ID NO: 1420 - protein, 8 aa, Artificial Sequence
  Description of Artificial Sequence: Synthetic peptide
IYPGSSST

SEQ ID NO: 1421 - protein, 14 aa, Artificial Sequence
  Description of Artificial Sequence: Synthetic peptide
ARHSPGHRDYAMDY

SEQ ID NO: 1422 - protein, 6 aa, Artificial Sequence
  Description of Artificial Sequence: Synthetic peptide
QNVGTA

SEQ ID NO: 1423 - protein, 3 aa, Artificial Sequence
  Description of Artificial Sequence: Synthetic peptide
SAS

SEQ ID NO: 1424 - protein, 9 aa, Artificial Sequence
  Description of Artificial Sequence: Synthetic peptide
QQYSTYPLT

SEQ ID NO: 1425 - protein, 121 aa, Artificial Sequence
  Description of Artificial Sequence: Synthetic polypeptide
QVQLQQPGADLVKPGASVKLSCKASGYTSTSHWIHWVKQRPGQGLEWIGNIYPGSSSTNYNEKFKRMATLTVDTSSSTVYMVLSSLTSDDSAVYYCARHSPGHRDYAMDYWGLGTSVTVSS

SEQ ID NO: 1426 - protein, 107 aa, Artificial Sequence
  Description of Artificial Sequence: Synthetic polypeptide
DIVMTQSQKFMPTTVGDRVSITCKASQNVGTAVAWYQQKPGQSPKLLIASASNRYTGVPDRFTGSGSGTDFTLTISTMQSEDLADYFCQQYSTYPLTFGAGTKLEMK

SEQ ID NO: 1427 - protein, 451 aa, Artificial Sequence
  Description of Artificial Sequence: Synthetic polypeptide
QVQLQQPGADLVKPGASVKLSCKASGYTSTSHWIHWVKQRPGQGLEWIGNIYPGSSSTNYNEKFKRMATLTVDTSSSTVYMVLSSLTSDDSAVYYCARHSPGHRDYAMDYWGLGTSVTVSSASTKGPSVFPLAPSSKSTSGGTAALGCLVKDYFPEPVTVSWNSGALTSGVHTFPAVLQSSGLYSLSSVVTVPSSSLGTQTYICNVNHKPSNTKVDKKVEPKSCDKTHTCPPCPAPELLGGPSVFLFPPKPKDTLMISRTPEVTCVVVDVSHEDPEVKFNWYVDGVEVHNAKTKPREEQYNSTYRVVSVLTVLHQDWLNGKEYKCKVSNKALPAPIEKTISKAKGQPREPQVYTLPPSREEMTKNQVSLTCLVKGFYPSDIAVEWESNGQPENNYKTTPPVLDSDGSFFLYSKLTVDKSRWQQGNVFSCSVMHEALHNHYTQKSLSLSPGK

SEQ ID NO: 1428 - protein, 214 aa, Artificial Sequence
  Description of Artificial Sequence: Synthetic polypeptide
DIVMTQSQKFMPTTVGDRVSITCKASQNVGTAVAWYQQKPGQSPKLLIASASNRYTGVPDRFTGSGSGTDFTLTISTMQSEDLADYFCQQYSTYPLTFGAGTKLEMKRTVAAPSVFIFPPSDEQLKSGTASVVCLLNNFYPREAKVQWKVDNALQSGNSQESVTEQDSKDSTYSLSSTLTLSKADYEKHKVYACEVTHQGLSSPVTKSFNRGEC

SEQ ID NO: 1429 - protein, 7 aa, Artificial Sequence
  Description of Artificial Sequence: Synthetic peptide
TSGMGVS

SEQ ID NO: 1430 - protein, 16 aa, Artificial Sequence
  Description of Artificial Sequence: Synthetic peptide
HIFWDDDRRYKSSLKS

SEQ ID NO: 1431 - protein, 12 aa, Artificial Sequence
  Description of Artificial Sequence: Synthetic peptide
RVGYGDYAYFDV

SEQ ID NO: 1432 - protein, 11 aa, Artificial Sequence
  Description of Artificial Sequence: Synthetic peptide
RASENIYSDLA

SEQ ID NO: 1433 - protein, 7 aa, Artificial Sequence
  Description of Artificial Sequence: Synthetic peptide
AATNLAD

SEQ ID NO: 1434 - protein, 9 aa, Artificial Sequence
  Description of Artificial Sequence: Synthetic peptide
QHFWGTPWT

SEQ ID NO: 1435 - protein, 9 aa, Artificial Sequence
  Description of Artificial Sequence: Synthetic peptide
GFSLSTSGM

SEQ ID NO: 1436 - protein, 5 aa, Artificial Sequence
  Description of Artificial Sequence: Synthetic peptide
FWDDD

SEQ ID NO: 1437 - protein, 11 aa, Artificial Sequence
  Description of Artificial Sequence: Synthetic peptide
RVGYGDYAYFD

SEQ ID NO: 1438 - protein, 7 aa, Artificial Sequence
  Description of Artificial Sequence: Synthetic peptide
SENIYSD

SEQ ID NO: 1439 - protein, 3 aa, Artificial Sequence
  Description of Artificial Sequence: Synthetic peptide
AAT

SEQ ID NO: 1440 - protein, 6 aa, Artificial Sequence
  Description of Artificial Sequence: Synthetic peptide
FWGTPW

SEQ ID NO: 1441 - protein, 12 aa, Artificial Sequence
  Description of Artificial Sequence: Synthetic peptide
GFSLSTSGMGVS

SEQ ID NO: 1442 - protein, 9 aa, Artificial Sequence
  Description of Artificial Sequence: Synthetic peptide
HIFWDDDRR

SEQ ID NO: 1443 - protein, 12 aa, Artificial Sequence
  Description of Artificial Sequence: Synthetic peptide
RVGYGDYAYFDV

SEQ ID NO: 1444 - protein, 11 aa, Artificial Sequence
  Description of Artificial Sequence: Synthetic peptide
RASENIYSDLA

SEQ ID NO: 1445 - protein, 7 aa, Artificial Sequence
  Description of Artificial Sequence: Synthetic peptide
AATNLAD

SEQ ID NO: 1446 - protein, 9 aa, Artificial Sequence
  Description of Artificial Sequence: Synthetic peptide
QHFWGTPWT

SEQ ID NO: 1447 - protein, 8 aa, Artificial Sequence
  Description of Artificial Sequence: Synthetic peptide
STSGMGVS

SEQ ID NO: 1448 - protein, 12 aa, Artificial Sequence
  Description of Artificial Sequence: Synthetic peptide
WLAHIFWDDDRR

SEQ ID NO: 1449 - protein, 13 aa, Artificial Sequence
  Description of Artificial Sequence: Synthetic peptide
ARRVGYGDYAYFD

SEQ ID NO: 1450 - protein, 7 aa, Artificial Sequence
  Description of Artificial Sequence: Synthetic peptide
YSDLAWY

SEQ ID NO: 1451 - protein, 10 aa, Artificial Sequence
  Description of Artificial Sequence: Synthetic peptide
LLVYAATNLA

SEQ ID NO: 1452 - protein, 8 aa, Artificial Sequence
  Description of Artificial Sequence: Synthetic peptide
QHFWGTPW

SEQ ID NO: 1453 - protein, 10 aa, Artificial Sequence
  Description of Artificial Sequence: Synthetic peptide
GFSLSTSGMG

SEQ ID NO: 1454 - protein, 7 aa, Artificial Sequence
  Description of Artificial Sequence: Synthetic peptide
IFWDDDR

SEQ ID NO: 1455 - protein, 14 aa, Artificial Sequence
  Description of Artificial Sequence: Synthetic peptide
ARRVGYGDYAYFDV

SEQ ID NO: 1456 - protein, 6 aa, Artificial Sequence
  Description of Artificial Sequence: Synthetic peptide
ENIYSD

SEQ ID NO: 1457 - protein, 3 aa, Artificial Sequence
  Description of Artificial Sequence: Synthetic peptide
AAT

SEQ ID NO: 1458 - protein, 9 aa, Artificial Sequence
  Description of Artificial Sequence: Synthetic peptide
QHFWGTPWT

SEQ ID NO: 1459 - protein, 122 aa, Artificial Sequence
  Description of Artificial Sequence: Synthetic polypeptide
QVTLKESGPGKVQPSQTLSLTCSFSGFSLSTSGMGVSWIRKPSGKGLEWLAHIFWDDDRRYKSSLKSRLTISKDTSSNQVFLMITSVDTADSATYYCARRVGYGDYAYFDVWGAGTTVTVSS

SEQ ID NO: 1460 - protein, 107 aa, Artificial Sequence
  Description of Artificial Sequence: Synthetic polypeptide
DIQMTQYPASLSVSVGETVTITCRASENIYSDLAWYQQKQGKSPQLLVYAATNLADGVPSRFSGSGSGTQYSLKINSLQSEDFGNYYCQHFWGTPWTFGGGTKLEIK

SEQ ID NO: 1461 - protein, 452 aa, Artificial Sequence
  Description of Artificial Sequence: Synthetic polypeptide
QVTLKESGPGKVQPSQTLSLTCSFSGFSLSTSGMGVSWIRKPSGKGLEWLAHIFWDDDRRYKSSLKSRLTISKDTSSNQVFLMITSVDTADSATYYCARRVGYGDYAYFDVWGAGTTVTVSSASTKGPSVFPLAPSSKSTSGGTAALGCLVKDYFPEPVTVSWNSGALTSGVHTFPAVLQSSGLYSLSSVVTVPSSSLGTQTYICNVNHKPSNTKVDKKVEPKSCDKTHTCPPCPAPELLGGPSVFLFPPKPKDTLMISRTPEVTCVVVDVSHEDPEVKFNWYVDGVEVHNAKTKPREEQYNSTYRVVSVLTVLHQDWLNGKEYKCKVSNKALPAPIEKTISKAKGQPREPQVYTLPPSREEMTKNQVSLTCLVKGFYPSDIAVEWESNGQPENNYKTTPPVLDSDGSFFLYSKLTVDKSRWQQGNVFSCSVMHEALHNHYTQKSLSLSPGK

SEQ ID NO: 1462 - protein, 214 aa, Artificial Sequence
  Description of Artificial Sequence: Synthetic polypeptide
DIQMTQYPASLSVSVGETVTITCRASENIYSDLAWYQQKQGKSPQLLVYAATNLADGVPSRFSGSGSGTQYSLKINSLQSEDFGNYYCQHFWGTPWTFGGGTKLEIKRTVAAPSVFIFPPSDEQLKSGTASVVCLLNNFYPREAKVQWKVDNALQSGNSQESVTEQDSKDSTYSLSSTLTLSKADYEKHKVYACEVTHQGLSSPVTKSFNRGEC

SEQ ID NO: 1463 - protein, 5 aa, Artificial Sequence
  Description of Artificial Sequence: Synthetic peptide
NYWIN

SEQ ID NO: 1464 - protein, 17 aa, Artificial Sequence
  Description of Artificial Sequence: Synthetic peptide
NIYPGSDSSNYNEKFKT

SEQ ID NO: 1465 - protein, 12 aa, Artificial Sequence
  Description of Artificial Sequence: Synthetic peptide
EEADYRYTWFVY

SEQ ID NO: 1466 - protein, 11 aa, Artificial Sequence
  Description of Artificial Sequence: Synthetic peptide
KASQNVGTAVA

SEQ ID NO: 1467 - protein, 7 aa, Artificial Sequence
  Description of Artificial Sequence: Synthetic peptide
SASNRYT

SEQ ID NO: 1468 - protein, 9 aa, Artificial Sequence
  Description of Artificial Sequence: Synthetic peptide
QQYSSYPLT

SEQ ID NO: 1469 - protein, 7 aa, Artificial Sequence
  Description of Artificial Sequence: Synthetic peptide
GYSFTNY

SEQ ID NO: 1470 - protein, 6 aa, Artificial Sequence
  Description of Artificial Sequence: Synthetic peptide
YPGSDS

SEQ ID NO: 1471 - protein, 11 aa, Artificial Sequence
  Description of Artificial Sequence: Synthetic peptide
EEADYRYTWFV

SEQ ID NO: 1472 - protein, 7 aa, Artificial Sequence
  Description of Artificial Sequence: Synthetic peptide
SQNVGTA

SEQ ID NO: 1473 - protein, 3 aa, Artificial Sequence
  Description of Artificial Sequence: Synthetic peptide
SAS

SEQ ID NO: 1474 - protein, 6 aa, Artificial Sequence
  Description of Artificial Sequence: Synthetic peptide
YSSYPL

SEQ ID NO: 1475 - protein, 10 aa, Artificial Sequence
  Description of Artificial Sequence: Synthetic peptide
GYSFTNYWIN

SEQ ID NO: 1476 - protein, 10 aa, Artificial Sequence
  Description of Artificial Sequence: Synthetic peptide
NIYPGSDSSN

SEQ ID NO: 1477 - protein, 12 aa, Artificial Sequence
  Description of Artificial Sequence: Synthetic peptide
EEADYRYTWFVY

SEQ ID NO: 1478 - protein, 11 aa, Artificial Sequence
  Description of Artificial Sequence: Synthetic peptide
KASQNVGTAVA

SEQ ID NO: 1479 - protein, 7 aa, Artificial Sequence
  Description of Artificial Sequence: Synthetic peptide
SASNRYT

SEQ ID NO: 1480 - protein, 9 aa, Artificial Sequence
  Description of Artificial Sequence: Synthetic peptide
QQYSSYPLT

SEQ ID NO: 1481 - protein, 6 aa, Artificial Sequence
  Description of Artificial Sequence: Synthetic peptide
TNYWIN

SEQ ID NO: 1482 - protein, 13 aa, Artificial Sequence
  Description of Artificial Sequence: Synthetic peptide
WIGNIYPGSDSSN

SEQ ID NO: 1483 - protein, 13 aa, Artificial Sequence
  Description of Artificial Sequence: Synthetic peptide
AREEADYRYTWFV

SEQ ID NO: 1484 - protein, 7 aa, Artificial Sequence
  Description of Artificial Sequence: Synthetic peptide
GTAVAWY

SEQ ID NO: 1485 - protein, 10 aa, Artificial Sequence
  Description of Artificial Sequence: Synthetic peptide
LLIYSASNRY

SEQ ID NO: 1486 - protein, 8 aa, Artificial Sequence
  Description of Artificial Sequence: Synthetic peptide
QQYSSYPL

SEQ ID NO: 1487 - protein, 8 aa, Artificial Sequence
  Description of Artificial Sequence: Synthetic peptide
GYSFTNYW

SEQ ID NO: 1488 - protein, 8 aa, Artificial Sequence
  Description of Artificial Sequence: Synthetic peptide
IYPGSDSS

SEQ ID NO: 1489 - protein, 14 aa, Artificial Sequence
  Description of Artificial Sequence: Synthetic peptide
AREEADYRYTWFVY

SEQ ID NO: 1490 - protein, 6 aa, Artificial Sequence
  Description of Artificial Sequence: Synthetic peptide
QNVGTA

SEQ ID NO: 1491 - protein, 3 aa, Artificial Sequence
  Description of Artificial Sequence: Synthetic peptide
SAS

SEQ ID NO: 1492 - protein, 9 aa, Artificial Sequence
  Description of Artificial Sequence: Synthetic peptide
QQYSSYPLT

SEQ ID NO: 1493 - protein, 121 aa, Artificial Sequence
  Description of Artificial Sequence: Synthetic polypeptide
QVQLQQSGAELVKPGASVKLSCKASGYSFTNYWINWMKQRPGQGLEWIGNIYPGSDSSNYNEKFKTKATLTVDTSSSTAYMQLSSLTSDDSAVYYCAREEADYRYTWFVYWGQGTLVTVSA

SEQ ID NO: 1494 - protein, 107 aa, Artificial Sequence
  Description of Artificial Sequence: Synthetic polypeptide
DIKMTQSQKFMSTTVGDRVSITCKASQNVGTAVAWYQQKPGQSPKLLIYSASNRYTGVPDRFTGSGSGTDFTLTFSNMQSEDLADYFCQQYSSYPLTFGAGTKLEMK

SEQ ID NO: 1495 - protein, 451 aa, Artificial Sequence
  Description of Artificial Sequence: Synthetic polypeptide
QVQLQQSGAELVKPGASVKLSCKASGYSFTNYWINWMKQRPGQGLEWIGNIYPGSDSSNYNEKFKTKATLTVDTSSSTAYMQLSSLTSDDSAVYYCAREEADYRYTWFVYWGQGTLVTVSAASTKGPSVFPLAPSSKSTSGGTAALGCLVKDYFPEPVTVSWNSGALTSGVHTFPAVLQSSGLYSLSSVVTVPSSSLGTQTYICNVNHKPSNTKVDKKVEPKSCDKTHTCPPCPAPELLGGPSVFLFPPKPKDTLMISRTPEVTCVVVDVSHEDPEVKFNWYVDGVEVHNAKTKPREEQYNSTYRVVSVLTVLHQDWLNGKEYKCKVSNKALPAPIEKTISKAKGQPREPQVYTLPPSREEMTKNQVSLTCLVKGFYPSDIAVEWESNGQPENNYKTTPPVLDSDGSFFLYSKLTVDKSRWQQGNVFSCSVMHEALHNHYTQKSLSLSPGK

SEQ ID NO: 1496 - protein, 214 aa, Artificial Sequence
  Description of Artificial Sequence: Synthetic polypeptide
DIKMTQSQKFMSTTVGDRVSITCKASQNVGTAVAWYQQKPGQSPKLLIYSASNRYTGVPDRFTGSGSGTDFTLTFSNMQSEDLADYFCQQYSSYPLTFGAGTKLEMKRTVAAPSVFIFPPSDEQLKSGTASVVCLLNNFYPREAKVQWKVDNALQSGNSQESVTEQDSKDSTYSLSSTLTLSKADYEKHKVYACEVTHQGLSSPVTKSFNRGEC

SEQ ID NO: 1497 - protein, 5 aa, Artificial Sequence
  Description of Artificial Sequence: Synthetic peptide
SYWIN

SEQ ID NO: 1498 - protein, 17 aa, Artificial Sequence
  Description of Artificial Sequence: Synthetic peptide
NIYPGSSSTNYNEKFKN

SEQ ID NO: 1499 - protein, 12 aa, Artificial Sequence
  Description of Artificial Sequence: Synthetic peptide
EEYSYKSSWFAY

SEQ ID NO: 1500 - protein, 11 aa, Artificial Sequence
  Description of Artificial Sequence: Synthetic peptide
KASQNVGTAVA

SEQ ID NO: 1501 - protein, 7 aa, Artificial Sequence
  Description of Artificial Sequence: Synthetic peptide
SASNRYN

SEQ ID NO: 1502 - protein, 9 aa, Artificial Sequence
  Description of Artificial Sequence: Synthetic peptide
QQYSTYPYT

SEQ ID NO: 1503 - protein, 7 aa, Artificial Sequence
  Description of Artificial Sequence: Synthetic peptide
GYSFTSY

SEQ ID NO: 1504 - protein, 6 aa, Artificial Sequence
  Description of Artificial Sequence: Synthetic peptide
YPGSSS

SEQ ID NO: 1505 - protein, 11 aa, Artificial Sequence
  Description of Artificial Sequence: Synthetic peptide
EEYSYKSSWFA

SEQ ID NO: 1506 - protein, 7 aa, Artificial Sequence
  Description of Artificial Sequence: Synthetic peptide
SQNVGTA

SEQ ID NO: 1507 - protein, 3 aa, Artificial Sequence
  Description of Artificial Sequence: Synthetic peptide
SAS

SEQ ID NO: 1508 - protein, 6 aa, Artificial Sequence
  Description of Artificial Sequence: Synthetic peptide
YSTYPY

SEQ ID NO: 1509 - protein, 10 aa, Artificial Sequence
  Description of Artificial Sequence: Synthetic peptide
GYSFTSYWIN

SEQ ID NO: 1510 - protein, 10 aa, Artificial Sequence
  Description of Artificial Sequence: Synthetic peptide
NIYPGSSSTN

SEQ ID NO: 1511 - protein, 12 aa, Artificial Sequence
  Description of Artificial Sequence: Synthetic peptide
EEYSYKSSWFAY

SEQ ID NO: 1512 - protein, 11 aa, Artificial Sequence
  Description of Artificial Sequence: Synthetic peptide
KASQNVGTAVA

SEQ ID NO: 1513 - protein, 7 aa, Artificial Sequence
  Description of Artificial Sequence: Synthetic peptide
SASNRYN

SEQ ID NO: 1514 - protein, 9 aa, Artificial Sequence
  Description of Artificial Sequence: Synthetic peptide
QQYSTYPYT

SEQ ID NO: 1515 - protein, 6 aa, Artificial Sequence
  Description of Artificial Sequence: Synthetic peptide
TSYWIN

SEQ ID NO: 1516 - protein, 13 aa, Artificial Sequence
  Description of Artificial Sequence: Synthetic peptide
WIGNIYPGSSSTN

SEQ ID NO: 1517 - protein, 13 aa, Artificial Sequence
  Description of Artificial Sequence: Synthetic peptide
AREEYSYKSSWFA

SEQ ID NO: 1518 - protein, 7 aa, Artificial Sequence
  Description of Artificial Sequence: Synthetic peptide
GTAVAWY

SEQ ID NO: 1519 - protein, 10 aa, Artificial Sequence
  Description of Artificial Sequence: Synthetic peptide
LLIYSASNRY

SEQ ID NO: 1520 - protein, 8 aa, Artificial Sequence
  Description of Artificial Sequence: Synthetic peptide
QQYSTYPY

SEQ ID NO: 1521 - protein, 8 aa, Artificial Sequence
  Description of Artificial Sequence: Synthetic peptide
GYSFTSYW

SEQ ID NO: 1522 - protein, 8 aa, Artificial Sequence
  Description of Artificial Sequence: Synthetic peptide
IYPGSSST

SEQ ID NO: 1523 - protein, 14 aa, Artificial Sequence
  Description of Artificial Sequence: Synthetic peptide
AREEYSYKSSWFAY

SEQ ID NO: 1524 - protein, 6 aa, Artificial Sequence
  Description of Artificial Sequence: Synthetic peptide
QNVGTA

SEQ ID NO: 1525 - protein, 3 aa, Artificial Sequence
  Description of Artificial Sequence: Synthetic peptide
SAS

SEQ ID NO: 1526 - protein, 9 aa, Artificial Sequence
  Description of Artificial Sequence: Synthetic peptide
QQYSTYPYT

SEQ ID NO: 1527 - protein, 121 aa, Artificial Sequence
  Description of Artificial Sequence: Synthetic polypeptide
EVQLQQSGTELVKPGASVKLSCKASGYSFTSYWINWVKQRPGQGPEWIGNIYPGSSSTNYNEKFKNKATLTVDTSSSTAYMQLSSLTSDDSAVYYCAREEYSYKSSWFAYWGQGTLVTVSA

SEQ ID NO: 1528 - protein, 107 aa, Artificial Sequence
  Description of Artificial Sequence: Synthetic polypeptide
DIVMTQSQKFMSTTVGDRVSITCKASQNVGTAVAWYQQKPGQSPKLLIYSASNRYNGVPDRFTGSGSGTDFTLTISNMQSEDLADYFCQQYSTYPYTFGSGTKLEIK

SEQ ID NO: 1529 - protein, 451 aa, Artificial Sequence
  Description of Artificial Sequence: Synthetic polypeptide
EVQLQQSGTELVKPGASVKLSCKASGYSFTSYWINWVKQRPGQGPEWIGNIYPGSSSTNYNEKFKNKATLTVDTSSSTAYMQLSSLTSDDSAVYYCAREEYSYKSSWFAYWGQGTLVTVSAASTKGPSVFPLAPSSKSTSGGTAALGCLVKDYFPEPVTVSWNSGALTSGVHTFPAVLQSSGLYSLSSVVTVPSSSLGTQTYICNVNHKPSNTKVDKKVEPKSCDKTHTCPPCPAPELLGGPSVFLFPPKPKDTLMISRTPEVTCVVVDVSHEDPEVKFNWYVDGVEVHNAKTKPREEQYNSTYRVVSVLTVLHQDWLNGKEYKCKVSNKALPAPIEKTISKAKGQPREPQVYTLPPSREEMTKNQVSLTCLVKGFYPSDIAVEWESNGQPENNYKTTPPVLDSDGSFFLYSKLTVDKSRWQQGNVFSCSVMHEALHNHYTQKSLSLSPGK

SEQ ID NO: 1530 - protein, 214 aa, Artificial Sequence
  Description of Artificial Sequence: Synthetic polypeptide
DIVMTQSQKFMSTTVGDRVSITCKASQNVGTAVAWYQQKPGQSPKLLIYSASNRYNGVPDRFTGSGSGTDFTLTISNMQSEDLADYFCQQYSTYPYTFGSGTKLEIKRTVAAPSVFIFPPSDEQLKSGTASVVCLLNNFYPREAKVQWKVDNALQSGNSQESVTEQDSKDSTYSLSSTLTLSKADYEKHKVYACEVTHQGLSSPVTKSFNRGEC

SEQ ID NO: 1531 - protein, 5 aa, Artificial Sequence
  Description of Artificial Sequence: Synthetic peptide
SYWIS

SEQ ID NO: 1532 - protein, 17 aa, Artificial Sequence
  Description of Artificial Sequence: Synthetic peptide
NIYPGSSSSNYNENFKS

SEQ ID NO: 1533 - protein, 12 aa, Artificial Sequence
  Description of Artificial Sequence: Synthetic peptide
EEYSYFPSWFAY

SEQ ID NO: 1534 - protein, 11 aa, Artificial Sequence
  Description of Artificial Sequence: Synthetic peptide
KASQNVGTAVA

SEQ ID NO: 1535 - protein, 7 aa, Artificial Sequence
  Description of Artificial Sequence: Synthetic peptide
SASNRYT

SEQ ID NO: 1536 - protein, 9 aa, Artificial Sequence
  Description of Artificial Sequence: Synthetic peptide
QQYSTYPFT

SEQ ID NO: 1537 - protein, 7 aa, Artificial Sequence
  Description of Artificial Sequence: Synthetic peptide
GYTFTSY

SEQ ID NO: 1538 - protein, 6 aa, Artificial Sequence
  Description of Artificial Sequence: Synthetic peptide
YPGSSS

SEQ ID NO: 1539 - protein, 11 aa, Artificial Sequence
  Description of Artificial Sequence: Synthetic peptide
EEYSYFPSWFA

SEQ ID NO: 1540 - protein, 7 aa, Artificial Sequence
  Description of Artificial Sequence: Synthetic peptide
SQNVGTA

SEQ ID NO: 1541 - protein, 3 aa, Artificial Sequence
  Description of Artificial Sequence: Synthetic peptide
SAS

SEQ ID NO: 1542 - protein, 6 aa, Artificial Sequence
  Description of Artificial Sequence: Synthetic peptide
YSTYPF

SEQ ID NO: 1543 - protein, 10 aa, Artificial Sequence
  Description of Artificial Sequence: Synthetic peptide
GYTFTSYWIS

SEQ ID NO: 1544 - protein, 10 aa, Artificial Sequence
  Description of Artificial Sequence: Synthetic peptide
NIYPGSSSSN

SEQ ID NO: 1545 - protein, 12 aa, Artificial Sequence
  Description of Artificial Sequence: Synthetic peptide
EEYSYFPSWFAY

SEQ ID NO: 1546 - protein, 11 aa, Artificial Sequence
  Description of Artificial Sequence: Synthetic peptide
KASQNVGTAVA

SEQ ID NO: 1547 - protein, 7 aa, Artificial Sequence
  Description of Artificial Sequence: Synthetic peptide
SASNRYT

SEQ ID NO: 1548 - protein, 9 aa, Artificial Sequence
  Description of Artificial Sequence: Synthetic peptide
QQYSTYPFT

SEQ ID NO: 1549 - protein, 6 aa, Artificial Sequence
  Description of Artificial Sequence: Synthetic peptide
TSYWIS

SEQ ID NO: 1550 - protein, 13 aa, Artificial Sequence
  Description of Artificial Sequence: Synthetic peptide
WIGNIYPGSSSSN

SEQ ID NO: 1551 - protein, 13 aa, Artificial Sequence
  Description of Artificial Sequence: Synthetic peptide
AREEYSYFPSWFA

SEQ ID NO: 1552 - protein, 7 aa, Artificial Sequence
  Description of Artificial Sequence: Synthetic peptide
GTAVAWF

SEQ ID NO: 1553 - protein, 10 aa, Artificial Sequence
  Description of Artificial Sequence: Synthetic peptide
LLIYSASNRY

SEQ ID NO: 1554 - protein, 8 aa, Artificial Sequence
  Description of Artificial Sequence: Synthetic peptide
QQYSTYPF

SEQ ID NO: 1555 - protein, 8 aa, Artificial Sequence
  Description of Artificial Sequence: Synthetic peptide
GYTFTSYW

SEQ ID NO: 1556 - protein, 8 aa, Artificial Sequence
  Description of Artificial Sequence: Synthetic peptide
IYPGSSSS

SEQ ID NO: 1557 - protein, 14 aa, Artificial Sequence
  Description of Artificial Sequence: Synthetic peptide
AREEYSYFPSWFAY

SEQ ID NO: 1558 - protein, 6 aa, Artificial Sequence
  Description of Artificial Sequence: Synthetic peptide
QNVGTA

SEQ ID NO: 1559 - protein, 3 aa, Artificial Sequence
  Description of Artificial Sequence: Synthetic peptide
SAS

SEQ ID NO: 1560 - protein, 9 aa, Artificial Sequence
  Description of Artificial Sequence: Synthetic peptide
QQYSTYPFT

SEQ ID NO: 1561 - protein, 121 aa, Artificial Sequence
  Description of Artificial Sequence: Synthetic polypeptide
EVQLQQSGAELVKPGASVKLSCKASGYTFTSYWISWVKQRPGQGLEWIGNIYPGSSSSNYNENFKSKATLTVDTSSSTAHMQLSSLTSDDSAVFYCAREEYSYFPSWFAYWGQGTSVTVSS

SEQ ID NO: 1562 - protein, 107 aa, Artificial Sequence
  Description of Artificial Sequence: Synthetic polypeptide
DIVMTQSQKFMSTTIGDRVSITCKASQNVGTAVAWFQQKPGQSPKLLIYSASNRYTGVPDRFTGSGSGTDFTLTISNMQSEDLANYFCQQYSTYPFTFGGGTKLEIK

SEQ ID NO: 1563 - protein, 451 aa, Artificial Sequence
  Description of Artificial Sequence: Synthetic polypeptide
EVQLQQSGAELVKPGASVKLSCKASGYTFTSYWISWVKQRPGQGLEWIGNIYPGSSSSNYNENFKSKATLTVDTSSSTAHMQLSSLTSDDSAVFYCAREEYSYFPSWFAYWGQGTSVTVSSASTKGPSVFPLAPSSKSTSGGTAALGCLVKDYFPEPVTVSWNSGALTSGVHTFPAVLQSSGLYSLSSVVTVPSSSLGTQTYICNVNHKPSNTKVDKKVEPKSCDKTHTCPPCPAPELLGGPSVFLFPPKPKDTLMISRTPEVTCVVVDVSHEDPEVKFNWYVDGVEVHNAKTKPREEQYNSTYRVVSVLTVLHQDWLNGKEYKCKVSNKALPAPIEKTISKAKGQPREPQVYTLPPSREEMTKNQVSLTCLVKGFYPSDIAVEWESNGQPENNYKTTPPVLDSDGSFFLYSKLTVDKSRWQQGNVFSCSVMHEALHNHYTQKSLSLSPGK

SEQ ID NO: 1564 - protein, 214 aa, Artificial Sequence
  Description of Artificial Sequence: Synthetic polypeptide
DIVMTQSQKFMSTTIGDRVSITCKASQNVGTAVAWFQQKPGQSPKLLIYSASNRYTGVPDRFTGSGSGTDFTLTISNMQSEDLANYFCQQYSTYPFTFGGGTKLEIKRTVAAPSVFIFPPSDEQLKSGTASVVCLLNNFYPREAKVQWKVDNALQSGNSQESVTEQDSKDSTYSLSSTLTLSKADYEKHKVYACEVTHQGLSSPVTKSFNRGEC

SEQ ID NO: 1565 - protein, 5 aa, Artificial Sequence
  Description of Artificial Sequence: Synthetic peptide
SFWIN

SEQ ID NO: 1566 - protein, 17 aa, Artificial Sequence
  Description of Artificial Sequence: Synthetic peptide
NIYPGSSSTNYSEKFKN

SEQ ID NO: 1567 - protein, 12 aa, Artificial Sequence
  Description of Artificial Sequence: Synthetic peptide
EEYSYKSSWFAY

SEQ ID NO: 1568 - protein, 11 aa, Artificial Sequence
  Description of Artificial Sequence: Synthetic peptide
KASQNVGTAVA

SEQ ID NO: 1569 - protein, 7 aa, Artificial Sequence
  Description of Artificial Sequence: Synthetic peptide
SASNRYN

SEQ ID NO: 1570 - protein, 9 aa, Artificial Sequence
  Description of Artificial Sequence: Synthetic peptide
QQYSTYPYT

SEQ ID NO: 1571 - protein, 7 aa, Artificial Sequence
  Description of Artificial Sequence: Synthetic peptide
GYSFASF

SEQ ID NO: 1572 - protein, 6 aa, Artificial Sequence
  Description of Artificial Sequence: Synthetic peptide
YPGSSS

SEQ ID NO: 1573 - protein, 11 aa, Artificial Sequence
  Description of Artificial Sequence: Synthetic peptide
EEYSYKSSWFA

SEQ ID NO: 1574 - protein, 7 aa, Artificial Sequence
  Description of Artificial Sequence: Synthetic peptide
SQNVGTA

SEQ ID NO: 1575 - protein, 3 aa, Artificial Sequence
  Description of Artificial Sequence: Synthetic peptide
SAS

SEQ ID NO: 1576 - protein, 6 aa, Artificial Sequence
  Description of Artificial Sequence: Synthetic peptide
YSTYPY

SEQ ID NO: 1577 - protein, 10 aa, Artificial Sequence
  Description of Artificial Sequence: Synthetic peptide
GYSFASFWIN

SEQ ID NO: 1578 - protein, 10 aa, Artificial Sequence
  Description of Artificial Sequence: Synthetic peptide
NIYPGSSSTN

SEQ ID NO: 1579 - protein, 12 aa, Artificial Sequence
  Description of Artificial Sequence: Synthetic peptide
EEYSYKSSWFAY

SEQ ID NO: 1580 - protein, 11 aa, Artificial Sequence
  Description of Artificial Sequence: Synthetic peptide
KASQNVGTAVA

SEQ ID NO: 1581 - protein, 7 aa, Artificial Sequence
  Description of Artificial Sequence: Synthetic peptide
SASNRYN

SEQ ID NO: 1582 - protein, 9 aa, Artificial Sequence
  Description of Artificial Sequence: Synthetic peptide
QQYSTYPYT

SEQ ID NO: 1583 - protein, 6 aa, Artificial Sequence
  Description of Artificial Sequence: Synthetic peptide
ASFWIN

SEQ ID NO: 1584 - protein, 13 aa, Artificial Sequence
  Description of Artificial Sequence: Synthetic peptide
WIGNIYPGSSSTN

SEQ ID NO: 1585 - protein, 13 aa, Artificial Sequence
  Description of Artificial Sequence: Synthetic peptide
AREEYSYKSSWFA

SEQ ID NO: 1586 - protein, 7 aa, Artificial Sequence
  Description of Artificial Sequence: Synthetic peptide
GTAVAWY

SEQ ID NO: 1587 - protein, 10 aa, Artificial Sequence
  Description of Artificial Sequence: Synthetic peptide
LLIYSASNRY

SEQ ID NO: 1588 - protein, 8 aa, Artificial Sequence
  Description of Artificial Sequence: Synthetic peptide
QQYSTYPY

SEQ ID NO: 1589 - protein, 8 aa, Artificial Sequence
  Description of Artificial Sequence: Synthetic peptide
GYSFASFW

SEQ ID NO: 1590 - protein, 8 aa, Artificial Sequence
  Description of Artificial Sequence: Synthetic peptide
IYPGSSST

SEQ ID NO: 1591 - protein, 14 aa, Artificial Sequence
  Description of Artificial Sequence: Synthetic peptide
AREEYSYKSSWFAY

SEQ ID NO: 1592 - protein, 6 aa, Artificial Sequence
  Description of Artificial Sequence: Synthetic peptide
QNVGTA

SEQ ID NO: 1593 - protein, 3 aa, Artificial Sequence
  Description of Artificial Sequence: Synthetic peptide
SAS

SEQ ID NO: 1594 - protein, 9 aa, Artificial Sequence
  Description of Artificial Sequence: Synthetic peptide
QQYSTYPYT

SEQ ID NO: 1595 - protein, 121 aa, Artificial Sequence
  Description of Artificial Sequence: Synthetic polypeptide
QVQLQQPGTELVKPGASVKLSCKASGYSFASFWINWVKQRPGQGPEWIGNIYPGSSSTNYSEKFKNKATLTVDKSSSTAYMQLSSLTSDDSAVYYCAREEYSYKSSWFAYWGQGTTVTVSS

SEQ ID NO: 1596 - protein, 107 aa, Artificial Sequence
  Description of Artificial Sequence: Synthetic polypeptide
DIVMTQSQKFMSTTVGDRVSITCKASQNVGTAVAWYQQKPGQSPKLLIYSASNRYNGVPDRFTGSGSGTDFTLTISNMQSEDLADYFCQQYSTYPYTFGSGTKLELK

SEQ ID NO: 1597 - protein, 451 aa, Artificial Sequence
  Description of Artificial Sequence: Synthetic polypeptide
QVQLQQPGTELVKPGASVKLSCKASGYSFASFWINWVKQRPGQGPEWIGNIYPGSSSTNYSEKFKNKATLTVDKSSSTAYMQLSSLTSDDSAVYYCAREEYSYKSSWFAYWGQGTTVTVSSASTKGPSVFPLAPSSKSTSGGTAALGCLVKDYFPEPVTVSWNSGALTSGVHTFPAVLQSSGLYSLSSVVTVPSSSLGTQTYICNVNHKPSNTKVDKKVEPKSCDKTHTCPPCPAPELLGGPSVFLFPPKPKDTLMISRTPEVTCVVVDVSHEDPEVKFNWYVDGVEVHNAKTKPREEQYNSTYRVVSVLTVLHQDWLNGKEYKCKVSNKALPAPIEKTISKAKGQPREPQVYTLPPSREEMTKNQVSLTCLVKGFYPSDIAVEWESNGQPENNYKTTPPVLDSDGSFFLYSKLTVDKSRWQQGNVFSCSVMHEALHNHYTQKSLSLSPGK

SEQ ID NO: 1598 - protein, 214 aa, Artificial Sequence
  Description of Artificial Sequence: Synthetic polypeptide
DIVMTQSQKFMSTTVGDRVSITCKASQNVGTAVAWYQQKPGQSPKLLIYSASNRYNGVPDRFTGSGSGTDFTLTISNMQSEDLADYFCQQYSTYPYTFGSGTKLELKRTVAAPSVFIFPPSDEQLKSGTASVVCLLNNFYPREAKVQWKVDNALQSGNSQESVTEQDSKDSTYSLSSTLTLSKADYEKHKVYACEVTHQGLSSPVTKSFNRGEC

SEQ ID NO: 1599 - protein, 5 aa, Artificial Sequence
  Description of Artificial Sequence: Synthetic peptide
DDYIH

SEQ ID NO: 1600 - protein, 17 aa, Artificial Sequence
  Description of Artificial Sequence: Synthetic peptide
RIDPANGNPRYAPKFQD

SEQ ID NO: 1601 - protein, 10 aa, Artificial Sequence
  Description of Artificial Sequence: Synthetic peptide
DDEGYYYFDV

SEQ ID NO: 1602 - protein, 11 aa, Artificial Sequence
  Description of Artificial Sequence: Synthetic peptide
RASKSISKYLA

SEQ ID NO: 1603 - protein, 7 aa, Artificial Sequence
  Description of Artificial Sequence: Synthetic peptide
SGSTLQS

SEQ ID NO: 1604 - protein, 9 aa, Artificial Sequence
  Description of Artificial Sequence: Synthetic peptide
QQHNEYPLT

SEQ ID NO: 1605 - protein, 7 aa, Artificial Sequence
  Description of Artificial Sequence: Synthetic peptide
GFNIKDD

SEQ ID NO: 1606 - protein, 6 aa, Artificial Sequence
  Description of Artificial Sequence: Synthetic peptide
DPANGN

SEQ ID NO: 1607 - protein, 9 aa, Artificial Sequence
  Description of Artificial Sequence: Synthetic peptide
DDEGYYYFD

SEQ ID NO: 1608 - protein, 7 aa, Artificial Sequence
  Description of Artificial Sequence: Synthetic peptide
SKSISKY

SEQ ID NO: 1609 - protein, 3 aa, Artificial Sequence
  Description of Artificial Sequence: Synthetic peptide
SGS

SEQ ID NO: 1610 - protein, 6 aa, Artificial Sequence
  Description of Artificial Sequence: Synthetic peptide
HNEYPL

SEQ ID NO: 1611 - protein, 10 aa, Artificial Sequence
  Description of Artificial Sequence: Synthetic peptide
GFNIKDDYIH

SEQ ID NO: 1612 - protein, 10 aa, Artificial Sequence
  Description of Artificial Sequence: Synthetic peptide
RIDPANGNPR

SEQ ID NO: 1613 - protein, 10 aa, Artificial Sequence
  Description of Artificial Sequence: Synthetic peptide
DDEGYYYFDV

SEQ ID NO: 1614 - protein, 11 aa, Artificial Sequence
  Description of Artificial Sequence: Synthetic peptide
RASKSISKYLA

SEQ ID NO: 1615 - protein, 7 aa, Artificial Sequence
  Description of Artificial Sequence: Synthetic peptide
SGSTLQS

SEQ ID NO: 1616 - protein, 9 aa, Artificial Sequence
  Description of Artificial Sequence: Synthetic peptide
QQHNEYPLT

SEQ ID NO: 1617 - protein, 6 aa, Artificial Sequence
  Description of Artificial Sequence: Synthetic peptide
KDDYIH

SEQ ID NO: 1618 - protein, 13 aa, Artificial Sequence
  Description of Artificial Sequence: Synthetic peptide
WIGRIDPANGNPR

SEQ ID NO: 1619 - protein, 11 aa, Artificial Sequence
  Description of Artificial Sequence: Synthetic peptide
ARDDEGYYYFD

SEQ ID NO: 1620 - protein, 7 aa, Artificial Sequence
  Description of Artificial Sequence: Synthetic peptide
SKYLAWY

SEQ ID NO: 1621 - protein, 10 aa, Artificial Sequence
  Description of Artificial Sequence: Synthetic peptide
VLIYSGSTLQ

SEQ ID NO: 1622 - protein, 8 aa, Artificial Sequence
  Description of Artificial Sequence: Synthetic peptide
QQHNEYPL

SEQ ID NO: 1623 - protein, 8 aa, Artificial Sequence
  Description of Artificial Sequence: Synthetic peptide
GFNIKDDY

SEQ ID NO: 1624 - protein, 8 aa, Artificial Sequence
  Description of Artificial Sequence: Synthetic peptide
IDPANGNP

SEQ ID NO: 1625 - protein, 12 aa, Artificial Sequence
  Description of Artificial Sequence: Synthetic peptide
ARDDEGYYYFDV

SEQ ID NO: 1626 - protein, 6 aa, Artificial Sequence
  Description of Artificial Sequence: Synthetic peptide
KSISKY

SEQ ID NO: 1627 - protein, 3 aa, Artificial Sequence
  Description of Artificial Sequence: Synthetic peptide
SGS

SEQ ID NO: 1628 - protein, 9 aa, Artificial Sequence
  Description of Artificial Sequence: Synthetic peptide
QQHNEYPLT

SEQ ID NO: 1629 - protein, 119 aa, Artificial Sequence
  Description of Artificial Sequence: Synthetic polypeptide
EVQLQQSGPELVRPGASVKLSCTASGFNIKDDYIHWVKQRPEQGLEWIGRIDPANGNPRYAPKFQDKATLTADTSSNTAYLQLSSLTSEDTAVYYCARDDEGYYYFDVWGAGTSVTVSS

SEQ ID NO: 1630 - protein, 107 aa, Artificial Sequence
  Description of Artificial Sequence: Synthetic polypeptide
DIKMTQSPSYLAASPGETITINCRASKSISKYLAWYQEKPGKTNKVLIYSGSTLQSGIPSRFSGSGSGTDFTLTISSLEPEDFAIYYCQQHNEYPLTFGDGTRLEIK

SEQ ID NO: 1631 - protein, 449 aa, Artificial Sequence
  Description of Artificial Sequence: Synthetic polypeptide
EVQLQQSGPELVRPGASVKLSCTASGFNIKDDYIHWVKQRPEQGLEWIGRIDPANGNPRYAPKFQDKATLTADTSSNTAYLQLSSLTSEDTAVYYCARDDEGYYYFDVWGAGTSVTVSSASTKGPSVFPLAPSSKSTSGGTAALGCLVKDYFPEPVTVSWNSGALTSGVHTFPAVLQSSGLYSLSSVVTVPSSSLGTQTYICNVNHKPSNTKVDKKVEPKSCDKTHTCPPCPAPELLGGPSVFLFPPKPKDTLMISRTPEVTCVVVDVSHEDPEVKFNWYVDGVEVHNAKTKPREEQYNSTYRVVSVLTVLHQDWLNGKEYKCKVSNKALPAPIEKTISKAKGQPREPQVYTLPPSREEMTKNQVSLTCLVKGFYPSDIAVEWESNGQPENNYKTTPPVLDSDGSFFLYSKLTVDKSRWQQGNVFSCSVMHEALHNHYTQKSLSLSPGK

SEQ ID NO: 1632 - protein, 214 aa, Artificial Sequence
  Description of Artificial Sequence: Synthetic polypeptide
DIKMTQSPSYLAASPGETITINCRASKSISKYLAWYQEKPGKTNKVLIYSGSTLQSGIPSRFSGSGSGTDFTLTISSLEPEDFAIYYCQQHNEYPLTFGDGTRLEIKRTVAAPSVFIFPPSDEQLKSGTASVVCLLNNFYPREAKVQWKVDNALQSGNSQESVTEQDSKDSTYSLSSTLTLSKADYEKHKVYACEVTHQGLSSPVTKSFNRGEC

SEQ ID NO: 1633 - protein, 5 aa, Artificial Sequence
  Description of Artificial Sequence: Synthetic peptide
SYWIN

SEQ ID NO: 1634 - protein, 17 aa, Artificial Sequence
  Description of Artificial Sequence: Synthetic peptide
NIYPFSSSTNYNEKFKK

SEQ ID NO: 1635 - protein, 12 aa, Artificial Sequence
  Description of Artificial Sequence: Synthetic peptide
EEFSHYPSWFAY

SEQ ID NO: 1636 - protein, 11 aa, Artificial Sequence
  Description of Artificial Sequence: Synthetic peptide
KASQNVGIAVA

SEQ ID NO: 1637 - protein, 7 aa, Artificial Sequence
  Description of Artificial Sequence: Synthetic peptide
SASNRYT

SEQ ID NO: 1638 - protein, 9 aa, Artificial Sequence
  Description of Artificial Sequence: Synthetic peptide
QQYSTDPYT

SEQ ID NO: 1639 - protein, 7 aa, Artificial Sequence
  Description of Artificial Sequence: Synthetic peptide
GYTFTSY

SEQ ID NO: 1640 - protein, 6 aa, Artificial Sequence
  Description of Artificial Sequence: Synthetic peptide
YPFSSS

SEQ ID NO: 1641 - protein, 11 aa, Artificial Sequence
  Description of Artificial Sequence: Synthetic peptide
EEFSHYPSWFA

SEQ ID NO: 1642 - protein, 7 aa, Artificial Sequence
  Description of Artificial Sequence: Synthetic peptide
SQNVGIA

SEQ ID NO: 1643 - protein, 3 aa, Artificial Sequence
  Description of Artificial Sequence: Synthetic peptide
SAS

SEQ ID NO: 1644 - protein, 6 aa, Artificial Sequence
  Description of Artificial Sequence: Synthetic peptide
YSTDPY

SEQ ID NO: 1645 - protein, 10 aa, Artificial Sequence
  Description of Artificial Sequence: Synthetic peptide
GYTFTSYWIN

SEQ ID NO: 1646 - protein, 10 aa, Artificial Sequence
  Description of Artificial Sequence: Synthetic peptide
NIYPFSSSTN

SEQ ID NO: 1647 - protein, 12 aa, Artificial Sequence
  Description of Artificial Sequence: Synthetic peptide
EEFSHYPSWFAY

SEQ ID NO: 1648 - protein, 11 aa, Artificial Sequence
  Description of Artificial Sequence: Synthetic peptide
KASQNVGIAVA

SEQ ID NO: 1649 - protein, 7 aa, Artificial Sequence
  Description of Artificial Sequence: Synthetic peptide
SASNRYT

SEQ ID NO: 1650 - protein, 9 aa, Artificial Sequence
  Description of Artificial Sequence: Synthetic peptide
QQYSTDPYT

SEQ ID NO: 1651 - protein, 6 aa, Artificial Sequence
  Description of Artificial Sequence: Synthetic peptide
TSYWIN

SEQ ID NO: 1652 - protein, 13 aa, Artificial Sequence
  Description of Artificial Sequence: Synthetic peptide
WIGNIYPFSSSTN

SEQ ID NO: 1653 - protein, 13 aa, Artificial Sequence
  Description of Artificial Sequence: Synthetic peptide
AREEFSHYPSWFA

SEQ ID NO: 1654 - protein, 7 aa, Artificial Sequence
  Description of Artificial Sequence: Synthetic peptide
GIAVAWF

SEQ ID NO: 1655 - protein, 10 aa, Artificial Sequence
  Description of Artificial Sequence: Synthetic peptide
LLIYSASNRY

SEQ ID NO: 1656 - protein, 8 aa, Artificial Sequence
  Description of Artificial Sequence: Synthetic peptide
QQYSTDPY

SEQ ID NO: 1657 - protein, 8 aa, Artificial Sequence
  Description of Artificial Sequence: Synthetic peptide
GYTFTSYW

SEQ ID NO: 1658 - protein, 8 aa, Artificial Sequence
  Description of Artificial Sequence: Synthetic peptide
IYPFSSST

SEQ ID NO: 1659 - protein, 14 aa, Artificial Sequence
  Description of Artificial Sequence: Synthetic peptide
AREEFSHYPSWFAY

SEQ ID NO: 1660 - protein, 6 aa, Artificial Sequence
  Description of Artificial Sequence: Synthetic peptide
QNVGIA

SEQ ID NO: 1661 - protein, 3 aa, Artificial Sequence
  Description of Artificial Sequence: Synthetic peptide
SAS

SEQ ID NO: 1662 - protein, 9 aa, Artificial Sequence
  Description of Artificial Sequence: Synthetic peptide
QQYSTDPYT

SEQ ID NO: 1663 - protein, 121 aa, Artificial Sequence
  Description of Artificial Sequence: Synthetic polypeptide
QVQLQQPGTELVKPGASVKLSCKASGYTFTSYWINWMKQRPGQGLEWIGNIYPFSSSTNYNEKFKKKATLTVDASSSTASMQLSSLTSDDSAVYFCAREEFSHYPSWFAYWGQGTTLTVSS

SEQ ID NO: 1664 - protein, 107 aa, Artificial Sequence
  Description of Artificial Sequence: Synthetic polypeptide
DIVMTQSQKFMSTTVGDRVSITCKASQNVGIAVAWFQQKPGQSPKLLIYSASNRYTGVPDRFTGSGSGTDFTLTIGNMQSEDLADYFCQQYSTDPYTFGSGTKLEIK

SEQ ID NO: 1665 - protein, 451 aa, Artificial Sequence
  Description of Artificial Sequence: Synthetic polypeptide
QVQLQQPGTELVKPGASVKLSCKASGYTFTSYWINWMKQRPGQGLEWIGNIYPFSSSTNYNEKFKKKATLTVDASSSTASMQLSSLTSDDSAVYFCAREEFSHYPSWFAYWGQGTTLTVSSASTKGPSVFPLAPSSKSTSGGTAALGCLVKDYFPEPVTVSWNSGALTSGVHTFPAVLQSSGLYSLSSVVTVPSSSLGTQTYICNVNHKPSNTKVDKKVEPKSCDKTHTCPPCPAPELLGGPSVFLFPPKPKDTLMISRTPEVTCVVVDVSHEDPEVKFNWYVDGVEVHNAKTKPREEQYNSTYRVVSVLTVLHQDWLNGKEYKCKVSNKALPAPIEKTISKAKGQPREPQVYTLPPSREEMTKNQVSLTCLVKGFYPSDIAVEWESNGQPENNYKTTPPVLDSDGSFFLYSKLTVDKSRWQQGNVFSCSVMHEALHNHYTQKSLSLSPGK

SEQ ID NO: 1666 - protein, 214 aa, Artificial Sequence
  Description of Artificial Sequence: Synthetic polypeptide
DIVMTQSQKFMSTTVGDRVSITCKASQNVGIAVAWFQQKPGQSPKLLIYSASNRYTGVPDRFTGSGSGTDFTLTIGNMQSEDLADYFCQQYSTDPYTFGSGTKLEIKRTVAAPSVFIFPPSDEQLKSGTASVVCLLNNFYPREAKVQWKVDNALQSGNSQESVTEQDSKDSTYSLSSTLTLSKADYEKHKVYACEVTHQGLSSPVTKSFNRGEC

SEQ ID NO: 1667 - protein, 5 aa, Artificial Sequence
  Description of Artificial Sequence: Synthetic peptide
SYWIN

SEQ ID NO: 1668 - protein, 17 aa, Artificial Sequence
  Description of Artificial Sequence: Synthetic peptide
NIYPGSSSTNYNEKFKN

SEQ ID NO: 1669 - protein, 13 aa, Artificial Sequence
  Description of Artificial Sequence: Synthetic peptide
ELGAYYHYSAMDY

SEQ ID NO: 1670 - protein, 11 aa, Artificial Sequence
  Description of Artificial Sequence: Synthetic peptide
KASQNVGTAVA

SEQ ID NO: 1671 - protein, 7 aa, Artificial Sequence
  Description of Artificial Sequence: Synthetic peptide
SASNRYT

SEQ ID NO: 1672 - protein, 9 aa, Artificial Sequence
  Description of Artificial Sequence: Synthetic peptide
QQYSIYPFT

SEQ ID NO: 1673 - protein, 7 aa, Artificial Sequence
  Description of Artificial Sequence: Synthetic peptide
GYTFTSY

SEQ ID NO: 1674 - protein, 6 aa, Artificial Sequence
  Description of Artificial Sequence: Synthetic peptide
YPGSSS

SEQ ID NO: 1675 - protein, 12 aa, Artificial Sequence
  Description of Artificial Sequence: Synthetic peptide
ELGAYYHYSAMD

SEQ ID NO: 1676 - protein, 7 aa, Artificial Sequence
  Description of Artificial Sequence: Synthetic peptide
SQNVGTA

SEQ ID NO: 1677 - protein, 3 aa, Artificial Sequence
  Description of Artificial Sequence: Synthetic peptide
SAS

SEQ ID NO: 1678 - protein, 6 aa, Artificial Sequence
  Description of Artificial Sequence: Synthetic peptide
YSIYPF

SEQ ID NO: 1679 - protein, 10 aa, Artificial Sequence
  Description of Artificial Sequence: Synthetic peptide
GYTFTSYWIN

SEQ ID NO: 1680 - protein, 10 aa, Artificial Sequence
  Description of Artificial Sequence: Synthetic peptide
NIYPGSSSTN

SEQ ID NO: 1681 - protein, 13 aa, Artificial Sequence
  Description of Artificial Sequence: Synthetic peptide
ELGAYYHYSAMDY

SEQ ID NO: 1682 - protein, 11 aa, Artificial Sequence
  Description of Artificial Sequence: Synthetic peptide
KASQNVGTAVA

SEQ ID NO: 1683 - protein, 7 aa, Artificial Sequence
  Description of Artificial Sequence: Synthetic peptide
SASNRYT

SEQ ID NO: 1684 - protein, 9 aa, Artificial Sequence
  Description of Artificial Sequence: Synthetic peptide
QQYSIYPFT

SEQ ID NO: 1685 - protein, 6 aa, Artificial Sequence
  Description of Artificial Sequence: Synthetic peptide
TSYWIN

SEQ ID NO: 1686 - protein, 13 aa, Artificial Sequence
  Description of Artificial Sequence: Synthetic peptide
WIGNIYPGSSSTN

SEQ ID NO: 1687 - protein, 14 aa, Artificial Sequence
  Description of Artificial Sequence: Synthetic peptide
TRELGAYYHYSAMD

SEQ ID NO: 1688 - protein, 7 aa, Artificial Sequence
  Description of Artificial Sequence: Synthetic peptide
GTAVAWY

SEQ ID NO: 1689 - protein, 10 aa, Artificial Sequence
  Description of Artificial Sequence: Synthetic peptide
LLIYSASNRY

SEQ ID NO: 1690 - protein, 8 aa, Artificial Sequence
  Description of Artificial Sequence: Synthetic peptide
QQYSIYPF

SEQ ID NO: 1691 - protein, 8 aa, Artificial Sequence
  Description of Artificial Sequence: Synthetic peptide
GYTFTSYW

SEQ ID NO: 1692 - protein, 8 aa, Artificial Sequence
  Description of Artificial Sequence: Synthetic peptide
IYPGSSST

SEQ ID NO: 1693 - protein, 15 aa, Artificial Sequence
  Description of Artificial Sequence: Synthetic peptide
TRELGAYYHYSAMDY

SEQ ID NO: 1694 - protein, 6 aa, Artificial Sequence
  Description of Artificial Sequence: Synthetic peptide
QNVGTA

SEQ ID NO: 1695 - protein, 3 aa, Artificial Sequence
  Description of Artificial Sequence: Synthetic peptide
SAS

SEQ ID NO: 1696 - protein, 9 aa, Artificial Sequence
  Description of Artificial Sequence: Synthetic peptide
QQYSIYPFT

SEQ ID NO: 1697 - protein, 122 aa, Artificial Sequence
  Description of Artificial Sequence: Synthetic polypeptide
EVQLQQSGAELVKPGASVKLSCKASGYTFTSYWINWVKQRPGQGLEWIGNIYPGSSSTNYNEKFKNKATLTVDTSSSTVYMQLSSLTSDDSAVYYCTRELGAYYHYSAMDYWGQGTSVTVSS

SEQ ID NO: 1698 - protein, 107 aa, Artificial Sequence
  Description of Artificial Sequence: Synthetic polypeptide
DIVLTQSQKIMSTTVGDRVSITCKASQNVGTAVAWYQQKPGQSPKLLIYSASNRYTGVPDRFTGSGSGTDFTLTISNMQSEDLADYFCQQYSIYPFTFGSGTKLEIK

SEQ ID NO: 1699 - protein, 452 aa, Artificial Sequence
  Description of Artificial Sequence: Synthetic polypeptide
EVQLQQSGAELVKPGASVKLSCKASGYTFTSYWINWVKQRPGQGLEWIGNIYPGSSSTNYNEKFKNKATLTVDTSSSTVYMQLSSLTSDDSAVYYCTRELGAYYHYSAMDYWGQGTSVTVSSASTKGPSVFPLAPSSKSTSGGTAALGCLVKDYFPEPVTVSWNSGALTSGVHTFPAVLQSSGLYSLSSVVTVPSSSLGTQTYICNVNHKPSNTKVDKKVEPKSCDKTHTCPPCPAPELLGGPSVFLFPPKPKDTLMISRTPEVTCVVVDVSHEDPEVKFNWYVDGVEVHNAKTKPREEQYNSTYRVVSVLTVLHQDWLNGKEYKCKVSNKALPAPIEKTISKAKGQPREPQVYTLPPSREEMTKNQVSLTCLVKGFYPSDIAVEWESNGQPENNYKTTPPVLDSDGSFFLYSKLTVDKSRWQQGNVFSCSVMHEALHNHYTQKSLSLSPGK

SEQ ID NO: 1700 - protein, 214 aa, Artificial Sequence
  Description of Artificial Sequence: Synthetic polypeptide
DIVLTQSQKIMSTTVGDRVSITCKASQNVGTAVAWYQQKPGQSPKLLIYSASNRYTGVPDRFTGSGSGTDFTLTISNMQSEDLADYFCQQYSIYPFTFGSGTKLEIKRTVAAPSVFIFPPSDEQLKSGTASVVCLLNNFYPREAKVQWKVDNALQSGNSQESVTEQDSKDSTYSLSSTLTLSKADYEKHKVYACEVTHQGLSSPVTKSFNRGEC

SEQ ID NO: 1701 - protein, 5 aa, Artificial Sequence
  Description of Artificial Sequence: Synthetic peptide
SYWMH

SEQ ID NO: 1702 - protein, 17 aa, Artificial Sequence
  Description of Artificial Sequence: Synthetic peptide
NINPSSGYAVYNQKFKD

SEQ ID NO: 1703 - protein, 11 aa, Artificial Sequence
  Description of Artificial Sequence: Synthetic peptide
RVFYGDSWFAY

SEQ ID NO: 1704 - protein, 11 aa, Artificial Sequence
  Description of Artificial Sequence: Synthetic peptide
RASGNIHNYLA

SEQ ID NO: 1705 - protein, 7 aa, Artificial Sequence
  Description of Artificial Sequence: Synthetic peptide
NAKTLAD

SEQ ID NO: 1706 - protein, 9 aa, Artificial Sequence
  Description of Artificial Sequence: Synthetic peptide
QHFWSTTWT

SEQ ID NO: 1707 - protein, 7 aa, Artificial Sequence
  Description of Artificial Sequence: Synthetic peptide
GYIFTSY

SEQ ID NO: 1708 - protein, 6 aa, Artificial Sequence
  Description of Artificial Sequence: Synthetic peptide
NPSSGY

SEQ ID NO: 1709 - protein, 10 aa, Artificial Sequence
  Description of Artificial Sequence: Synthetic peptide
RVFYGDSWFA

SEQ ID NO: 1710 - protein, 7 aa, Artificial Sequence
  Description of Artificial Sequence: Synthetic peptide
SGNIHNY

SEQ ID NO: 1711 - protein, 3 aa, Artificial Sequence
  Description of Artificial Sequence: Synthetic peptide
NAK

SEQ ID NO: 1712 - protein, 6 aa, Artificial Sequence
  Description of Artificial Sequence: Synthetic peptide
FWSTTW

SEQ ID NO: 1713 - protein, 10 aa, Artificial Sequence
  Description of Artificial Sequence: Synthetic peptide
GYIFTSYWMH

SEQ ID NO: 1714 - protein, 10 aa, Artificial Sequence
  Description of Artificial Sequence: Synthetic peptide
NINPSSGYAV

SEQ ID NO: 1715 - protein, 11 aa, Artificial Sequence
  Description of Artificial Sequence: Synthetic peptide
RVFYGDSWFAY

SEQ ID NO: 1716 - protein, 11 aa, Artificial Sequence
  Description of Artificial Sequence: Synthetic peptide
RASGNIHNYLA

SEQ ID NO: 1717 - protein, 7 aa, Artificial Sequence
  Description of Artificial Sequence: Synthetic peptide
NAKTLAD

SEQ ID NO: 1718 - protein, 9 aa, Artificial Sequence
  Description of Artificial Sequence: Synthetic peptide
QHFWSTTWT

SEQ ID NO: 1719 - protein, 6 aa, Artificial Sequence
  Description of Artificial Sequence: Synthetic peptide
TSYWMH

SEQ ID NO: 1720 - protein, 13 aa, Artificial Sequence
  Description of Artificial Sequence: Synthetic peptide
WIGNINPSSGYAV

SEQ ID NO: 1721 - protein, 12 aa, Artificial Sequence
  Description of Artificial Sequence: Synthetic peptide
ARRVFYGDSWFA

SEQ ID NO: 1722 - protein, 7 aa, Artificial Sequence
  Description of Artificial Sequence: Synthetic peptide
HNYLAWY

SEQ ID NO: 1723 - protein, 10 aa, Artificial Sequence
  Description of Artificial Sequence: Synthetic peptide
LLVYNAKTLA

SEQ ID NO: 1724 - protein, 8 aa, Artificial Sequence
  Description of Artificial Sequence: Synthetic peptide
QHFWSTTW

SEQ ID NO: 1725 - protein, 8 aa, Artificial Sequence
  Description of Artificial Sequence: Synthetic peptide
GYIFTSYW

SEQ ID NO: 1726 - protein, 8 aa, Artificial Sequence
  Description of Artificial Sequence: Synthetic peptide
INPSSGYA

SEQ ID NO: 1727 - protein, 13 aa, Artificial Sequence
  Description of Artificial Sequence: Synthetic peptide
ARRVFYGDSWFAY

SEQ ID NO: 1728 - protein, 6 aa, Artificial Sequence
  Description of Artificial Sequence: Synthetic peptide
GNIHNY

SEQ ID NO: 1729 - protein, 3 aa, Artificial Sequence
  Description of Artificial Sequence: Synthetic peptide
NAK

SEQ ID NO: 1730 - protein, 9 aa, Artificial Sequence
  Description of Artificial Sequence: Synthetic peptide
QHFWSTTWT

SEQ ID NO: 1731 - protein, 120 aa, Artificial Sequence
  Description of Artificial Sequence: Synthetic polypeptide
QVQLQQSGAELAKPGASVKMSCKASGYIFTSYWMHWVKQRPGQGLEWIGNINPSSGYAVYNQKFKDKATLTADQSSSTAYIQLNSLTSEDSAVYYCARRVFYGDSWFAYWGQGTSVTVSS

SEQ ID NO: 1732 - protein, 107 aa, Artificial Sequence
  Description of Artificial Sequence: Synthetic polypeptide
DVQMIQSPASLSASVGETVTITCRASGNIHNYLAWYQQKQGKSPQLLVYNAKTLADGVPSRFSGSGSGTQYSLKINSLQPEDFGSYYCQHFWSTTWTFGGGTKLEIK

SEQ ID NO: 1733 - protein, 450 aa, Artificial Sequence
  Description of Artificial Sequence: Synthetic polypeptide
QVQLQQSGAELAKPGASVKMSCKASGYIFTSYWMHWVKQRPGQGLEWIGNINPSSGYAVYNQKFKDKATLTADQSSSTAYIQLNSLTSEDSAVYYCARRVFYGDSWFAYWGQGTSVTVSSASTKGPSVFPLAPSSKSTSGGTAALGCLVKDYFPEPVTVSWNSGALTSGVHTFPAVLQSSGLYSLSSVVTVPSSSLGTQTYICNVNHKPSNTKVDKKVEPKSCDKTHTCPPCPAPELLGGPSVFLFPPKPKDTLMISRTPEVTCVVVDVSHEDPEVKFNWYVDGVEVHNAKTKPREEQYNSTYRVVSVLTVLHQDWLNGKEYKCKVSNKALPAPIEKTISKAKGQPREPQVYTLPPSREEMTKNQVSLTCLVKGFYPSDIAVEWESNGQPENNYKTTPPVLDSDGSFFLYSKLTVDKSRWQQGNVFSCSVMHEALHNHYTQKSLSLSPGK

SEQ ID NO: 1734 - protein, 214 aa, Artificial Sequence
  Description of Artificial Sequence: Synthetic polypeptide
DVQMIQSPASLSASVGETVTITCRASGNIHNYLAWYQQKQGKSPQLLVYNAKTLADGVPSRFSGSGSGTQYSLKINSLQPEDFGSYYCQHFWSTTWTFGGGTKLEIKRTVAAPSVFIFPPSDEQLKSGTASVVCLLNNFYPREAKVQWKVDNALQSGNSQESVTEQDSKDSTYSLSSTLTLSKADYEKHKVYACEVTHQGLSSPVTKSFNRGEC

SEQ ID NO: 1735 - protein, 5 aa, Artificial Sequence
  Description of Artificial Sequence: Synthetic peptide
SYYMH

SEQ ID NO: 1736 - protein, 17 aa, Artificial Sequence
  Description of Artificial Sequence: Synthetic peptide
YIDPFNGNTNYKQKFKG

SEQ ID NO: 1737 - protein, 12 aa, Artificial Sequence
  Description of Artificial Sequence: Synthetic peptide
PNSNYVGTWFAY

SEQ ID NO: 1738 - protein, 11 aa, Artificial Sequence
  Description of Artificial Sequence: Synthetic peptide
HASQNINVWLS

SEQ ID NO: 1739 - protein, 7 aa, Artificial Sequence
  Description of Artificial Sequence: Synthetic peptide
KASNLHT

SEQ ID NO: 1740 - protein, 9 aa, Artificial Sequence
  Description of Artificial Sequence: Synthetic peptide
QQGQSFPFT

SEQ ID NO: 1741 - protein, 7 aa, Artificial Sequence
  Description of Artificial Sequence: Synthetic peptide
GYSFTSY

SEQ ID NO: 1742 - protein, 6 aa, Artificial Sequence
  Description of Artificial Sequence: Synthetic peptide
DPFNGN

SEQ ID NO: 1743 - protein, 11 aa, Artificial Sequence
  Description of Artificial Sequence: Synthetic peptide
PNSNYVGTWFA

SEQ ID NO: 1744 - protein, 7 aa, Artificial Sequence
  Description of Artificial Sequence: Synthetic peptide
SQNINVW

SEQ ID NO: 1745 - protein, 3 aa, Artificial Sequence
  Description of Artificial Sequence: Synthetic peptide
KAS

SEQ ID NO: 1746 - protein, 6 aa, Artificial Sequence
  Description of Artificial Sequence: Synthetic peptide
GQSFPF

SEQ ID NO: 1747 - protein, 10 aa, Artificial Sequence
  Description of Artificial Sequence: Synthetic peptide
GYSFTSYYMH

SEQ ID NO: 1748 - protein, 10 aa, Artificial Sequence
  Description of Artificial Sequence: Synthetic peptide
YIDPFNGNTN

SEQ ID NO: 1749 - protein, 12 aa, Artificial Sequence
  Description of Artificial Sequence: Synthetic peptide
PNSNYVGTWFAY

SEQ ID NO: 1750 - protein, 11 aa, Artificial Sequence
  Description of Artificial Sequence: Synthetic peptide
HASQNINVWLS

SEQ ID NO: 1751 - protein, 7 aa, Artificial Sequence
  Description of Artificial Sequence: Synthetic peptide
KASNLHT

SEQ ID NO: 1752 - protein, 9 aa, Artificial Sequence
  Description of Artificial Sequence: Synthetic peptide
QQGQSFPFT

SEQ ID NO: 1753 - protein, 6 aa, Artificial Sequence
  Description of Artificial Sequence: Synthetic peptide
TSYYMH

SEQ ID NO: 1754 - protein, 13 aa, Artificial Sequence
  Description of Artificial Sequence: Synthetic peptide
WIGYIDPFNGNTN

SEQ ID NO: 1755 - protein, 13 aa, Artificial Sequence
  Description of Artificial Sequence: Synthetic peptide
ASPNSNYVGTWFA

SEQ ID NO: 1756 - protein, 7 aa, Artificial Sequence
  Description of Artificial Sequence: Synthetic peptide
NVWLSWY

SEQ ID NO: 1757 - protein, 10 aa, Artificial Sequence
  Description of Artificial Sequence: Synthetic peptide
LLIYKASNLH

SEQ ID NO: 1758 - protein, 8 aa, Artificial Sequence
  Description of Artificial Sequence: Synthetic peptide
QQGQSFPF

SEQ ID NO: 1759 - protein, 8 aa, Artificial Sequence
  Description of Artificial Sequence: Synthetic peptide
GYSFTSYY

SEQ ID NO: 1760 - protein, 8 aa, Artificial Sequence
  Description of Artificial Sequence: Synthetic peptide
IDPFNGNT

SEQ ID NO: 1761 - protein, 14 aa, Artificial Sequence
  Description of Artificial Sequence: Synthetic peptide
ASPNSNYVGTWFAY

SEQ ID NO: 1762 - protein, 6 aa, Artificial Sequence
  Description of Artificial Sequence: Synthetic peptide
QNINVW

SEQ ID NO: 1763 - protein, 3 aa, Artificial Sequence
  Description of Artificial Sequence: Synthetic peptide
KAS

SEQ ID NO: 1764 - protein, 9 aa, Artificial Sequence
  Description of Artificial Sequence: Synthetic peptide
QQGQSFPFT

SEQ ID NO: 1765 - protein, 121 aa, Artificial Sequence
  Description of Artificial Sequence: Synthetic polypeptide
EFQLQQSGPELMKPGASVKISCKASGYSFTSYYMHWMKQSHGKSLEWIGYIDPFNGNTNYKQKFKGKATLTVDKSSSTAYMHLSSLTSEDSAVYYCASPNSNYVGTWFAYWGQGTTVTVSS

SEQ ID NO: 1766 - protein, 107 aa, Artificial Sequence
  Description of Artificial Sequence: Synthetic polypeptide
NTQMNQTPSSLSASLGDTVTITCHASQNINVWLSWYQQKPGNIPKLLIYKASNLHTGVPSRFSGSGSGTGFTLTISSLQPDDIATYYCQQGQSFPFTFGSGTKLEIK

SEQ ID NO: 1767 - protein, 451 aa, Artificial Sequence
  Description of Artificial Sequence: Synthetic polypeptide
EFQLQQSGPELMKPGASVKISCKASGYSFTSYYMHWMKQSHGKSLEWIGYIDPFNGNTNYKQKFKGKATLTVDKSSSTAYMHLSSLTSEDSAVYYCASPNSNYVGTWFAYWGQGTTVTVSSASTKGPSVFPLAPSSKSTSGGTAALGCLVKDYFPEPVTVSWNSGALTSGVHTFPAVLQSSGLYSLSSVVTVPSSSLGTQTYICNVNHKPSNTKVDKKVEPKSCDKTHTCPPCPAPELLGGPSVFLFPPKPKDTLMISRTPEVTCVVVDVSHEDPEVKFNWYVDGVEVHNAKTKPREEQYNSTYRVVSVLTVLHQDWLNGKEYKCKVSNKALPAPIEKTISKAKGQPREPQVYTLPPSREEMTKNQVSLTCLVKGFYPSDIAVEWESNGQPENNYKTTPPVLDSDGSFFLYSKLTVDKSRWQQGNVFSCSVMHEALHNHYTQKSLSLSPGK

SEQ ID NO: 1768 - protein, 214 aa, Artificial Sequence
  Description of Artificial Sequence: Synthetic polypeptide
NTQMNQTPSSLSASLGDTVTITCHASQNINVWLSWYQQKPGNIPKLLIYKASNLHTGVPSRFSGSGSGTGFTLTISSLQPDDIATYYCQQGQSFPFTFGSGTKLEIKRTVAAPSVFIFPPSDEQLKSGTASVVCLLNNFYPREAKVQWKVDNALQSGNSQESVTEQDSKDSTYSLSSTLTLSKADYEKHKVYACEVTHQGLSSPVTKSFNRGEC

SEQ ID NO: 1769 - protein, 5 aa, Artificial Sequence
  Description of Artificial Sequence: Synthetic peptide
DYYMN

SEQ ID NO: 1770 - protein, 17 aa, Artificial Sequence
  Description of Artificial Sequence: Synthetic peptide
VINPYNGGTTYNQRFTG

SEQ ID NO: 1771 - protein, 7 aa, Artificial Sequence
  Description of Artificial Sequence: Synthetic peptide
NYGAMDS

SEQ ID NO: 1772 - protein, 11 aa, Artificial Sequence
  Description of Artificial Sequence: Synthetic peptide
RASGNIHNYLA

SEQ ID NO: 1773 - protein, 7 aa, Artificial Sequence
  Description of Artificial Sequence: Synthetic peptide
NAKTLAD

SEQ ID NO: 1774 - protein, 9 aa, Artificial Sequence
  Description of Artificial Sequence: Synthetic peptide
QHFWITPPT

SEQ ID NO: 1775 - protein, 7 aa, Artificial Sequence
  Description of Artificial Sequence: Synthetic peptide
GYTFTDY

SEQ ID NO: 1776 - protein, 6 aa, Artificial Sequence
  Description of Artificial Sequence: Synthetic peptide
NPYNGG

SEQ ID NO: 1777 - protein, 6 aa, Artificial Sequence
  Description of Artificial Sequence: Synthetic peptide
NYGAMD

SEQ ID NO: 1778 - protein, 7 aa, Artificial Sequence
  Description of Artificial Sequence: Synthetic peptide
SGNIHNY

SEQ ID NO: 1779 - protein, 3 aa, Artificial Sequence
  Description of Artificial Sequence: Synthetic peptide
NAK

SEQ ID NO: 1780 - protein, 6 aa, Artificial Sequence
  Description of Artificial Sequence: Synthetic peptide
FWITPP

SEQ ID NO: 1781 - protein, 10 aa, Artificial Sequence
  Description of Artificial Sequence: Synthetic peptide
GYTFTDYYMN

SEQ ID NO: 1782 - protein, 10 aa, Artificial Sequence
  Description of Artificial Sequence: Synthetic peptide
VINPYNGGTT

SEQ ID NO: 1783 - protein, 7 aa, Artificial Sequence
  Description of Artificial Sequence: Synthetic peptide
NYGAMDS

SEQ ID NO: 1784 - protein, 11 aa, Artificial Sequence
  Description of Artificial Sequence: Synthetic peptide
RASGNIHNYLA

SEQ ID NO: 1785 - protein, 7 aa, Artificial Sequence
  Description of Artificial Sequence: Synthetic peptide
NAKTLAD

SEQ ID NO: 1786 - protein, 9 aa, Artificial Sequence
  Description of Artificial Sequence: Synthetic peptide
QHFWITPPT

SEQ ID NO: 1787 - protein, 6 aa, Artificial Sequence
  Description of Artificial Sequence: Synthetic peptide
TDYYMN

SEQ ID NO: 1788 - protein, 13 aa, Artificial Sequence
  Description of Artificial Sequence: Synthetic peptide
WIGVINPYNGGTT

SEQ ID NO: 1789 - protein, 8 aa, Artificial Sequence
  Description of Artificial Sequence: Synthetic peptide
ARNYGAMD

SEQ ID NO: 1790 - protein, 7 aa, Artificial Sequence
  Description of Artificial Sequence: Synthetic peptide
HNYLAWY

SEQ ID NO: 1791 - protein, 10 aa, Artificial Sequence
  Description of Artificial Sequence: Synthetic peptide
LLVSNAKTLA

SEQ ID NO: 1792 - protein, 8 aa, Artificial Sequence
  Description of Artificial Sequence: Synthetic peptide
QHFWITPP

SEQ ID NO: 1793 - protein, 8 aa, Artificial Sequence
  Description of Artificial Sequence: Synthetic peptide
GYTFTDYY

SEQ ID NO: 1794 - protein, 8 aa, Artificial Sequence
  Description of Artificial Sequence: Synthetic peptide
INPYNGGT

SEQ ID NO: 1795 - protein, 9 aa, Artificial Sequence
  Description of Artificial Sequence: Synthetic peptide
ARNYGAMDS

SEQ ID NO: 1796 - protein, 6 aa, Artificial Sequence
  Description of Artificial Sequence: Synthetic peptide
GNIHNY

SEQ ID NO: 1797 - protein, 3 aa, Artificial Sequence
  Description of Artificial Sequence: Synthetic peptide
NAK

SEQ ID NO: 1798 - protein, 9 aa, Artificial Sequence
  Description of Artificial Sequence: Synthetic peptide
QHFWITPPT

SEQ ID NO: 1799 - protein, 116 aa, Artificial Sequence
  Description of Artificial Sequence: Synthetic polypeptide
QVQLQQSGPVLVKPGASVKMSCKASGYTFTDYYMNWVMQSHGKSLEWIGVINPYNGGTTYNQRFTGKATLTVDKSSSTAYMELNSLTSEDSAVYYCARNYGAMDSWGQGTSVTVSS

SEQ ID NO: 1800 - protein, 107 aa, Artificial Sequence
  Description of Artificial Sequence: Synthetic polypeptide
DIQMTQSPASLSASVGETVTITCRASGNIHNYLAWYQQKQGKSPQLLVSNAKTLADGVPSRFGGSGSGTQYSLKINSLQPEDFGSYYCQHFWITPPTFGAGTRLEIK

SEQ ID NO: 1801 - protein, 446 aa, Artificial Sequence
  Description of Artificial Sequence: Synthetic polypeptide
QVQLQQSGPVLVKPGASVKMSCKASGYTFTDYYMNWVMQSHGKSLEWIGVINPYNGGTTYNQRFTGKATLTVDKSSSTAYMELNSLTSEDSAVYYCARNYGAMDSWGQGTSVTVSSASTKGPSVFPLAPSSKSTSGGTAALGCLVKDYFPEPVTVSWNSGALTSGVHTFPAVLQSSGLYSLSSVVTVPSSSLGTQTYICNVNHKPSNTKVDKKVEPKSCDKTHTCPPCPAPELLGGPSVFLFPPKPKDTLMISRTPEVTCVVVDVSHEDPEVKFNWYVDGVEVHNAKTKPREEQYNSTYRVVSVLTVLHQDWLNGKEYKCKVSNKALPAPIEKTISKAKGQPREPQVYTLPPSREEMTKNQVSLTCLVKGFYPSDIAVEWESNGQPENNYKTTPPVLDSDGSFFLYSKLTVDKSRWQQGNVFSCSVMHEALHNHYTQKSLSLSPGK

SEQ ID NO: 1802 - protein, 214 aa, Artificial Sequence
  Description of Artificial Sequence: Synthetic polypeptide
DIQMTQSPASLSASVGETVTITCRASGNIHNYLAWYQQKQGKSPQLLVSNAKTLADGVPSRFGGSGSGTQYSLKINSLQPEDFGSYYCQHFWITPPTFGAGTRLEIKRTVAAPSVFIFPPSDEQLKSGTASVVCLLNNFYPREAKVQWKVDNALQSGNSQESVTEQDSKDSTYSLSSTLTLSKADYEKHKVYACEVTHQGLSSPVTKSFNRGEC

SEQ ID NO: 1803 - protein, 5 aa, Artificial Sequence
  Description of Artificial Sequence: Synthetic peptide
DYYMN

SEQ ID NO: 1804 - protein, 17 aa, Artificial Sequence
  Description of Artificial Sequence: Synthetic peptide
DINPNGGGTSDNPKFKG

SEQ ID NO: 1805 - protein, 10 aa, Artificial Sequence
  Description of Artificial Sequence: Synthetic peptide
TSGTDWYFDV

SEQ ID NO: 1806 - protein, 11 aa, Artificial Sequence
  Description of Artificial Sequence: Synthetic peptide
KASQNVGTAVA

SEQ ID NO: 1807 - protein, 7 aa, Artificial Sequence
  Description of Artificial Sequence: Synthetic peptide
SASNRYT

SEQ ID NO: 1808 - protein, 9 aa, Artificial Sequence
  Description of Artificial Sequence: Synthetic peptide
QQYSSYPFT

SEQ ID NO: 1809 - protein, 7 aa, Artificial Sequence
  Description of Artificial Sequence: Synthetic peptide
GYKFTDY

SEQ ID NO: 1810 - protein, 6 aa, Artificial Sequence
  Description of Artificial Sequence: Synthetic peptide
NPNGGG

SEQ ID NO: 1811 - protein, 9 aa, Artificial Sequence
  Description of Artificial Sequence: Synthetic peptide
TSGTDWYFD

SEQ ID NO: 1812 - protein, 7 aa, Artificial Sequence
  Description of Artificial Sequence: Synthetic peptide
SQNVGTA

SEQ ID NO: 1813 - protein, 3 aa, Artificial Sequence
  Description of Artificial Sequence: Synthetic peptide
SAS

SEQ ID NO: 1814 - protein, 6 aa, Artificial Sequence
  Description of Artificial Sequence: Synthetic peptide
YSSYPF

SEQ ID NO: 1815 - protein, 10 aa, Artificial Sequence
  Description of Artificial Sequence: Synthetic peptide
GYKFTDYYMN

SEQ ID NO: 1816 - protein, 10 aa, Artificial Sequence
  Description of Artificial Sequence: Synthetic peptide
DINPNGGGTS

SEQ ID NO: 1817 - protein, 10 aa, Artificial Sequence
  Description of Artificial Sequence: Synthetic peptide
TSGTDWYFDV

SEQ ID NO: 1818 - protein, 11 aa, Artificial Sequence
  Description of Artificial Sequence: Synthetic peptide
KASQNVGTAVA

SEQ ID NO: 1819 - protein, 7 aa, Artificial Sequence
  Description of Artificial Sequence: Synthetic peptide
SASNRYT

SEQ ID NO: 1820 - protein, 9 aa, Artificial Sequence
  Description of Artificial Sequence: Synthetic peptide
QQYSSYPFT

SEQ ID NO: 1821 - protein, 6 aa, Artificial Sequence
  Description of Artificial Sequence: Synthetic peptide
TDYYMN

SEQ ID NO: 1822 - protein, 13 aa, Artificial Sequence
  Description of Artificial Sequence: Synthetic peptide
WIGDINPNGGGTS

SEQ ID NO: 1823 - protein, 11 aa, Artificial Sequence
  Description of Artificial Sequence: Synthetic peptide
ARTSGTDWYFD

SEQ ID NO: 1824 - protein, 7 aa, Artificial Sequence
  Description of Artificial Sequence: Synthetic peptide
GTAVAWY

SEQ ID NO: 1825 - protein, 10 aa, Artificial Sequence
  Description of Artificial Sequence: Synthetic peptide
LLIYSASNRY

SEQ ID NO: 1826 - protein, 8 aa, Artificial Sequence
  Description of Artificial Sequence: Synthetic peptide
QQYSSYPF

SEQ ID NO: 1827 - protein, 8 aa, Artificial Sequence
  Description of Artificial Sequence: Synthetic peptide
GYKFTDYY

SEQ ID NO: 1828 - protein, 8 aa, Artificial Sequence
  Description of Artificial Sequence: Synthetic peptide
INPNGGGT

SEQ ID NO: 1829 - protein, 12 aa, Artificial Sequence
  Description of Artificial Sequence: Synthetic peptide
ARTSGTDWYFDV

SEQ ID NO: 1830 - protein, 6 aa, Artificial Sequence
  Description of Artificial Sequence: Synthetic peptide
QNVGTA

SEQ ID NO: 1831 - protein, 3 aa, Artificial Sequence
  Description of Artificial Sequence: Synthetic peptide
SAS

SEQ ID NO: 1832 - protein, 9 aa, Artificial Sequence
  Description of Artificial Sequence: Synthetic peptide
QQYSSYPFT

SEQ ID NO: 1833 - protein, 119 aa, Artificial Sequence
  Description of Artificial Sequence: Synthetic polypeptide
DVQLQESGPELVKPGASVKIACKTSGYKFTDYYMNWVKQSLGKSLDWIGDINPNGGGTSDNPKFKGKATLTVDKSSSTAYMELRSLTSEDSGVYYCARTSGTDWYFDVWGTGTTVTVSS

SEQ ID NO: 1834 - protein, 107 aa, Artificial Sequence
  Description of Artificial Sequence: Synthetic polypeptide
DIVMTQSQKFMSTTVGDRVSITCKASQNVGTAVAWYQQKPGQSPKLLIYSASNRYTGVPDRFTGSGSGTDFTLTISNMQSEDLADYFCQQYSSYPFTFGSGTKLEMK

SEQ ID NO: 1835 - protein, 449 aa, Artificial Sequence
  Description of Artificial Sequence: Synthetic polypeptide
DVQLQESGPELVKPGASVKIACKTSGYKFTDYYMNWVKQSLGKSLDWIGDINPNGGGTSDNPKFKGKATLTVDKSSSTAYMELRSLTSEDSGVYYCARTSGTDWYFDVWGTGTTVTVSSASTKGPSVFPLAPSSKSTSGGTAALGCLVKDYFPEPVTVSWNSGALTSGVHTFPAVLQSSGLYSLSSVVTVPSSSLGTQTYICNVNHKPSNTKVDKKVEPKSCDKTHTCPPCPAPELLGGPSVFLFPPKPKDTLMISRTPEVTCVVVDVSHEDPEVKFNWYVDGVEVHNAKTKPREEQYNSTYRVVSVLTVLHQDWLNGKEYKCKVSNKALPAPIEKTISKAKGQPREPQVYTLPPSREEMTKNQVSLTCLVKGFYPSDIAVEWESNGQPENNYKTTPPVLDSDGSFFLYSKLTVDKSRWQQGNVFSCSVMHEALHNHYTQKSLSLSPGK

SEQ ID NO: 1836 - protein, 214 aa, Artificial Sequence
  Description of Artificial Sequence: Synthetic polypeptide
DIVMTQSQKFMSTTVGDRVSITCKASQNVGTAVAWYQQKPGQSPKLLIYSASNRYTGVPDRFTGSGSGTDFTLTISNMQSEDLADYFCQQYSSYPFTFGSGTKLEMKRTVAAPSVFIFPPSDEQLKSGTASVVCLLNNFYPREAKVQWKVDNALQSGNSQESVTEQDSKDSTYSLSSTLTLSKADYEKHKVYACEVTHQGLSSPVTKSFNRGEC

SEQ ID NO: 1837 - protein, 5 aa, Artificial Sequence
  Description of Artificial Sequence: Synthetic peptide
TAGIQ

SEQ ID NO: 1838 - protein, 17 aa, Artificial Sequence
  Description of Artificial Sequence: Synthetic peptide
WINTHAGESKYADDFKG

SEQ ID NO: 1839 - protein, 12 aa, Artificial Sequence
  Description of Artificial Sequence: Synthetic peptide
SGDYDGSHPFAY

SEQ ID NO: 1840 - protein, 11 aa, Artificial Sequence
  Description of Artificial Sequence: Synthetic peptide
RASQDIRPYLN

SEQ ID NO: 1841 - protein, 7 aa, Artificial Sequence
  Description of Artificial Sequence: Synthetic peptide
YTSRLHS

SEQ ID NO: 1842 - protein, 9 aa, Artificial Sequence
  Description of Artificial Sequence: Synthetic peptide
QQDNTLPYT

SEQ ID NO: 1843 - protein, 7 aa, Artificial Sequence
  Description of Artificial Sequence: Synthetic peptide
GYTFTTA

SEQ ID NO: 1844 - protein, 6 aa, Artificial Sequence
  Description of Artificial Sequence: Synthetic peptide
NTHAGE

SEQ ID NO: 1845 - protein, 11 aa, Artificial Sequence
  Description of Artificial Sequence: Synthetic peptide
SGDYDGSHPFA

SEQ ID NO: 1846 - protein, 7 aa, Artificial Sequence
  Description of Artificial Sequence: Synthetic peptide
SQDIRPY

SEQ ID NO: 1847 - protein, 3 aa, Artificial Sequence
  Description of Artificial Sequence: Synthetic peptide
YTS

SEQ ID NO: 1848 - protein, 6 aa, Artificial Sequence
  Description of Artificial Sequence: Synthetic peptide
DNTLPY

SEQ ID NO: 1849 - protein, 10 aa, Artificial Sequence
  Description of Artificial Sequence: Synthetic peptide
GYTFTTAGIQ

SEQ ID NO: 1850 - protein, 10 aa, Artificial Sequence
  Description of Artificial Sequence: Synthetic peptide
WINTHAGESK

SEQ ID NO: 1851 - protein, 12 aa, Artificial Sequence
  Description of Artificial Sequence: Synthetic peptide
SGDYDGSHPFAY

SEQ ID NO: 1852 - protein, 11 aa, Artificial Sequence
  Description of Artificial Sequence: Synthetic peptide
RASQDIRPYLN

SEQ ID NO: 1853 - protein, 7 aa, Artificial Sequence
  Description of Artificial Sequence: Synthetic peptide
YTSRLHS

SEQ ID NO: 1854 - protein, 9 aa, Artificial Sequence
  Description of Artificial Sequence: Synthetic peptide
QQDNTLPYT

SEQ ID NO: 1855 - protein, 6 aa, Artificial Sequence
  Description of Artificial Sequence: Synthetic peptide
TTAGIQ

SEQ ID NO: 1856 - protein, 13 aa, Artificial Sequence
  Description of Artificial Sequence: Synthetic peptide
WIGWINTHAGESK

SEQ ID NO: 1857 - protein, 13 aa, Artificial Sequence
  Description of Artificial Sequence: Synthetic peptide
ARSGDYDGSHPFA

SEQ ID NO: 1858 - protein, 7 aa, Artificial Sequence
  Description of Artificial Sequence: Synthetic peptide
RPYLNWY

SEQ ID NO: 1859 - protein, 10 aa, Artificial Sequence
  Description of Artificial Sequence: Synthetic peptide
LLIYYTSRLH

SEQ ID NO: 1860 - protein, 8 aa, Artificial Sequence
  Description of Artificial Sequence: Synthetic peptide
QQDNTLPY

SEQ ID NO: 1861 - protein, 8 aa, Artificial Sequence
  Description of Artificial Sequence: Synthetic peptide
GYTFTTAG

SEQ ID NO: 1862 - protein, 8 aa, Artificial Sequence
  Description of Artificial Sequence: Synthetic peptide
INTHAGES

SEQ ID NO: 1863 - protein, 14 aa, Artificial Sequence
  Description of Artificial Sequence: Synthetic peptide
ARSGDYDGSHPFAY

SEQ ID NO: 1864 - protein, 6 aa, Artificial Sequence
  Description of Artificial Sequence: Synthetic peptide
QDIRPY

SEQ ID NO: 1865 - protein, 3 aa, Artificial Sequence
  Description of Artificial Sequence: Synthetic peptide
YTS

SEQ ID NO: 1866 - protein, 9 aa, Artificial Sequence
  Description of Artificial Sequence: Synthetic peptide
QQDNTLPYT

SEQ ID NO: 1867 - protein, 121 aa, Artificial Sequence
  Description of Artificial Sequence: Synthetic polypeptide
QVQLQQSGPELKKPGETVKISCKASGYTFTTAGIQWVQKMPGKGFKWIGWINTHAGESKYADDFKGRFAVSLETSASTAYLQISNLKNEDTATYFCARSGDYDGSHPFAYWGQGTSVTVSS

SEQ ID NO: 1868 - protein, 107 aa, Artificial Sequence
  Description of Artificial Sequence: Synthetic polypeptide
DIQMTQTTSSLSASLGDRVTITCRASQDIRPYLNWYQQKPEGTIKLLIYYTSRLHSGVPSRFSGSGSGTDYSLTISNLEQEDIATYFCQQDNTLPYTFGSGTKLEIK

SEQ ID NO: 1869 - protein, 451 aa, Artificial Sequence
  Description of Artificial Sequence: Synthetic polypeptide
QVQLQQSGPELKKPGETVKISCKASGYTFTTAGIQWVQKMPGKGFKWIGWINTHAGESKYADDFKGRFAVSLETSASTAYLQISNLKNEDTATYFCARSGDYDGSHPFAYWGQGTSVTVSSASTKGPSVFPLAPSSKSTSGGTAALGCLVKDYFPEPVTVSWNSGALTSGVHTFPAVLQSSGLYSLSSVVTVPSSSLGTQTYICNVNHKPSNTKVDKKVEPKSCDKTHTCPPCPAPELLGGPSVFLFPPKPKDTLMISRTPEVTCVVVDVSHEDPEVKFNWYVDGVEVHNAKTKPREEQYNSTYRVVSVLTVLHQDWLNGKEYKCKVSNKALPAPIEKTISKAKGQPREPQVYTLPPSREEMTKNQVSLTCLVKGFYPSDIAVEWESNGQPENNYKTTPPVLDSDGSFFLYSKLTVDKSRWQQGNVFSCSVMHEALHNHYTQKSLSLSPGK

SEQ ID NO: 1870 - protein, 214 aa, Artificial Sequence
  Description of Artificial Sequence: Synthetic polypeptide
DIQMTQTTSSLSASLGDRVTITCRASQDIRPYLNWYQQKPEGTIKLLIYYTSRLHSGVPSRFSGSGSGTDYSLTISNLEQEDIATYFCQQDNTLPYTFGSGTKLEIKRTVAAPSVFIFPPSDEQLKSGTASVVCLLNNFYPREAKVQWKVDNALQSGNSQESVTEQDSKDSTYSLSSTLTLSKADYEKHKVYACEVTHQGLSSPVTKSFNRGEC

SEQ ID NO: 1871 - protein, 5 aa, Artificial Sequence
  Description of Artificial Sequence: Synthetic peptide
DYYMN

SEQ ID NO: 1872 - protein, 17 aa, Artificial Sequence
  Description of Artificial Sequence: Synthetic peptide
DINPNGGGTSDNPKFKG

SEQ ID NO: 1873 - protein, 10 aa, Artificial Sequence
  Description of Artificial Sequence: Synthetic peptide
TSGTDWYFDV

SEQ ID NO: 1874 - protein, 11 aa, Artificial Sequence
  Description of Artificial Sequence: Synthetic peptide
KASQNVGTAVA

SEQ ID NO: 1875 - protein, 7 aa, Artificial Sequence
  Description of Artificial Sequence: Synthetic peptide
STSNRYT

SEQ ID NO: 1876 - protein, 9 aa, Artificial Sequence
  Description of Artificial Sequence: Synthetic peptide
QQYSIYPFT

SEQ ID NO: 1877 - protein, 7 aa, Artificial Sequence
  Description of Artificial Sequence: Synthetic peptide
GYTFTDY

SEQ ID NO: 1878 - protein, 6 aa, Artificial Sequence
  Description of Artificial Sequence: Synthetic peptide
NPNGGG

SEQ ID NO: 1879 - protein, 9 aa, Artificial Sequence
  Description of Artificial Sequence: Synthetic peptide
TSGTDWYFD

SEQ ID NO: 1880 - protein, 7 aa, Artificial Sequence
  Description of Artificial Sequence: Synthetic peptide
SQNVGTA

SEQ ID NO: 1881 - protein, 3 aa, Artificial Sequence
  Description of Artificial Sequence: Synthetic peptide
STS

SEQ ID NO: 1882 - protein, 6 aa, Artificial Sequence
  Description of Artificial Sequence: Synthetic peptide
YSIYPF

SEQ ID NO: 1883 - protein, 10 aa, Artificial Sequence
  Description of Artificial Sequence: Synthetic peptide
GYTFTDYYMN

SEQ ID NO: 1884 - protein, 10 aa, Artificial Sequence
  Description of Artificial Sequence: Synthetic peptide
DINPNGGGTS

SEQ ID NO: 1885 - protein, 10 aa, Artificial Sequence
  Description of Artificial Sequence: Synthetic peptide
TSGTDWYFDV

SEQ ID NO: 1886 - protein, 11 aa, Artificial Sequence
  Description of Artificial Sequence: Synthetic peptide
KASQNVGTAVA

SEQ ID NO: 1887 - protein, 7 aa, Artificial Sequence
  Description of Artificial Sequence: Synthetic peptide
STSNRYT

SEQ ID NO: 1888 - protein, 9 aa, Artificial Sequence
  Description of Artificial Sequence: Synthetic peptide
QQYSIYPFT

SEQ ID NO: 1889 - protein, 6 aa, Artificial Sequence
  Description of Artificial Sequence: Synthetic peptide
TDYYMN

SEQ ID NO: 1890 - protein, 13 aa, Artificial Sequence
  Description of Artificial Sequence: Synthetic peptide
WIGDINPNGGGTS

SEQ ID NO: 1891 - protein, 11 aa, Artificial Sequence
  Description of Artificial Sequence: Synthetic peptide
ARTSGTDWYFD

SEQ ID NO: 1892 - protein, 7 aa, Artificial Sequence
  Description of Artificial Sequence: Synthetic peptide
GTAVAWY

SEQ ID NO: 1893 - protein, 10 aa, Artificial Sequence
  Description of Artificial Sequence: Synthetic peptide
LLIYSTSNRY

SEQ ID NO: 1894 - protein, 8 aa, Artificial Sequence
  Description of Artificial Sequence: Synthetic peptide
QQYSIYPF

SEQ ID NO: 1895 - protein, 8 aa, Artificial Sequence
  Description of Artificial Sequence: Synthetic peptide
GYTFTDYY

SEQ ID NO: 1896 - protein, 8 aa, Artificial Sequence
  Description of Artificial Sequence: Synthetic peptide
INPNGGGT

SEQ ID NO: 1897 - protein, 12 aa, Artificial Sequence
  Description of Artificial Sequence: Synthetic peptide
ARTSGTDWYFDV

SEQ ID NO: 1898 - protein, 6 aa, Artificial Sequence
  Description of Artificial Sequence: Synthetic peptide
QNVGTA

SEQ ID NO: 1899 - protein, 3 aa, Artificial Sequence
  Description of Artificial Sequence: Synthetic peptide
STS

SEQ ID NO: 1900 - protein, 9 aa, Artificial Sequence
  Description of Artificial Sequence: Synthetic peptide
QQYSIYPFT

SEQ ID NO: 1901 - protein, 119 aa, Artificial Sequence
  Description of Artificial Sequence: Synthetic polypeptide
QIQLVQSGPELVKPGASVKISCKASGYTFTDYYMNWVKQSHGKSLDWIGDINPNGGGTSDNPKFKGKATLTVDKSSNTAYMELRSLTSEDSAVYYCARTSGTDWYFDVWGTGTLVTVSA

SEQ ID NO: 1902 - protein, 107 aa, Artificial Sequence
  Description of Artificial Sequence: Synthetic polypeptide
DIVMTQSQKFMSTTVGDRVSITCKASQNVGTAVAWYQQKPGQSPKLLIYSTSNRYTGVPDRFTGSGSGTDFTLTISNMQSEDLADYFCQQYSIYPFTFGSGTKLEMK

SEQ ID NO: 1903 - protein, 449 aa, Artificial Sequence
  Description of Artificial Sequence: Synthetic polypeptide
QIQLVQSGPELVKPGASVKISCKASGYTFTDYYMNWVKQSHGKSLDWIGDINPNGGGTSDNPKFKGKATLTVDKSSNTAYMELRSLTSEDSAVYYCARTSGTDWYFDVWGTGTLVTVSAASTKGPSVFPLAPSSKSTSGGTAALGCLVKDYFPEPVTVSWNSGALTSGVHTFPAVLQSSGLYSLSSVVTVPSSSLGTQTYICNVNHKPSNTKVDKKVEPKSCDKTHTCPPCPAPELLGGPSVFLFPPKPKDTLMISRTPEVTCVVVDVSHEDPEVKFNWYVDGVEVHNAKTKPREEQYNSTYRVVSVLTVLHQDWLNGKEYKCKVSNKALPAPIEKTISKAKGQPREPQVYTLPPSREEMTKNQVSLTCLVKGFYPSDIAVEWESNGQPENNYKTTPPVLDSDGSFFLYSKLTVDKSRWQQGNVFSCSVMHEALHNHYTQKSLSLSPGK

SEQ ID NO: 1904 - protein, 214 aa, Artificial Sequence
  Description of Artificial Sequence: Synthetic polypeptide
DIVMTQSQKFMSTTVGDRVSITCKASQNVGTAVAWYQQKPGQSPKLLIYSTSNRYTGVPDRFTGSGSGTDFTLTISNMQSEDLADYFCQQYSIYPFTFGSGTKLEMKRTVAAPSVFIFPPSDEQLKSGTASVVCLLNNFYPREAKVQWKVDNALQSGNSQESVTEQDSKDSTYSLSSTLTLSKADYEKHKVYACEVTHQGLSSPVTKSFNRGEC

SEQ ID NO: 1905 - protein, 5 aa, Artificial Sequence
  Description of Artificial Sequence: Synthetic peptide
DYYMS

SEQ ID NO: 1906 - protein, 19 aa, Artificial Sequence
  Description of Artificial Sequence: Synthetic peptide
LSRNKGNGYTTEYSASVKG

SEQ ID NO: 1907 - protein, 13 aa, Artificial Sequence
  Description of Artificial Sequence: Synthetic peptide
TVTGTLFYYALDY

SEQ ID NO: 1908 - protein, 11 aa, Artificial Sequence
  Description of Artificial Sequence: Synthetic peptide
RASENIYSYLA

SEQ ID NO: 1909 - protein, 7 aa, Artificial Sequence
  Description of Artificial Sequence: Synthetic peptide
NAKTLAA

SEQ ID NO: 1910 - protein, 9 aa, Artificial Sequence
  Description of Artificial Sequence: Synthetic peptide
QHHYGTPLT

SEQ ID NO: 1911 - protein, 7 aa, Artificial Sequence
  Description of Artificial Sequence: Synthetic peptide
GFTFTDY

SEQ ID NO: 1912 - protein, 8 aa, Artificial Sequence
  Description of Artificial Sequence: Synthetic peptide
RNKGNGYT

SEQ ID NO: 1913 - protein, 12 aa, Artificial Sequence
  Description of Artificial Sequence: Synthetic peptide
TVTGTLFYYALD

SEQ ID NO: 1914 - protein, 7 aa, Artificial Sequence
  Description of Artificial Sequence: Synthetic peptide
SENIYSY

SEQ ID NO: 1915 - protein, 3 aa, Artificial Sequence
  Description of Artificial Sequence: Synthetic peptide
NAK

SEQ ID NO: 1916 - protein, 6 aa, Artificial Sequence
  Description of Artificial Sequence: Synthetic peptide
HYGTPL

SEQ ID NO: 1917 - protein, 10 aa, Artificial Sequence
  Description of Artificial Sequence: Synthetic peptide
GFTFTDYYMS

SEQ ID NO: 1918 - protein, 12 aa, Artificial Sequence
  Description of Artificial Sequence: Synthetic peptide
LSRNKGNGYTTE

SEQ ID NO: 1919 - protein, 13 aa, Artificial Sequence
  Description of Artificial Sequence: Synthetic peptide
TVTGTLFYYALDY

SEQ ID NO: 1920 - protein, 11 aa, Artificial Sequence
  Description of Artificial Sequence: Synthetic peptide
RASENIYSYLA

SEQ ID NO: 1921 - protein, 7 aa, Artificial Sequence
  Description of Artificial Sequence: Synthetic peptide
NAKTLAA

SEQ ID NO: 1922 - protein, 9 aa, Artificial Sequence
  Description of Artificial Sequence: Synthetic peptide
QHHYGTPLT

SEQ ID NO: 1923 - protein, 6 aa, Artificial Sequence
  Description of Artificial Sequence: Synthetic peptide
TDYYMS

SEQ ID NO: 1924 - protein, 15 aa, Artificial Sequence
  Description of Artificial Sequence: Synthetic peptide
WLALSRNKGNGYTTE

SEQ ID NO: 1925 - protein, 14 aa, Artificial Sequence
  Description of Artificial Sequence: Synthetic peptide
ARTVTGTLFYYALD

SEQ ID NO: 1926 - protein, 7 aa, Artificial Sequence
  Description of Artificial Sequence: Synthetic peptide
YSYLAWY

SEQ ID NO: 1927 - protein, 10 aa, Artificial Sequence
  Description of Artificial Sequence: Synthetic peptide
FLVYNAKTLA

SEQ ID NO: 1928 - protein, 8 aa, Artificial Sequence
  Description of Artificial Sequence: Synthetic peptide
QHHYGTPL

SEQ ID NO: 1929 - protein, 8 aa, Artificial Sequence
  Description of Artificial Sequence: Synthetic peptide
GFTFTDYY

SEQ ID NO: 1930 - protein, 10 aa, Artificial Sequence
  Description of Artificial Sequence: Synthetic peptide
SRNKGNGYTT

SEQ ID NO: 1931 - protein, 15 aa, Artificial Sequence
  Description of Artificial Sequence: Synthetic peptide
ARTVTGTLFYYALDY

SEQ ID NO: 1932 - protein, 6 aa, Artificial Sequence
  Description of Artificial Sequence: Synthetic peptide
ENIYSY

SEQ ID NO: 1933 - protein, 3 aa, Artificial Sequence
  Description of Artificial Sequence: Synthetic peptide
NAK

SEQ ID NO: 1934 - protein, 9 aa, Artificial Sequence
  Description of Artificial Sequence: Synthetic peptide
QHHYGTPLT

SEQ ID NO: 1935 - protein, 124 aa, Artificial Sequence
  Description of Artificial Sequence: Synthetic polypeptide
EFQLQQSGGGLVQPGGSLSLSCAAPGFTFTDYYMSWVRQSPGKALEWLALSRNKGNGYTTEYSASVKGRFTISRDNSQSILYLQMNVLRAEDSATYYCARTVTGTLFYYALDYWGQGTTVTVSS

SEQ ID NO: 1936 - protein, 107 aa, Artificial Sequence
  Description of Artificial Sequence: Synthetic polypeptide
DIQMTQSPASLSASVGETVTITCRASENIYSYLAWYQQKQGKSPQFLVYNAKTLAAGVPSRFSGSGSGTQFSLKINRLQPEDFGTYYCQHHYGTPLTFGDGTRLEIK

SEQ ID NO: 1937 - protein, 454 aa, Artificial Sequence
  Description of Artificial Sequence: Synthetic polypeptide
EFQLQQSGGGLVQPGGSLSLSCAAPGFTFTDYYMSWVRQSPGKALEWLALSRNKGNGYTTEYSASVKGRFTISRDNSQSILYLQMNVLRAEDSATYYCARTVTGTLFYYALDYWGQGTTVTVSSASTKGPSVFPLAPSSKSTSGGTAALGCLVKDYFPEPVTVSWNSGALTSGVHTFPAVLQSSGLYSLSSVVTVPSSSLGTQTYICNVNHKPSNTKVDKKVEPKSCDKTHTCPPCPAPELLGGPSVFLFPPKPKDTLMISRTPEVTCVVVDVSHEDPEVKFNWYVDGVEVHNAKTKPREEQYNSTYRVVSVLTVLHQDWLNGKEYKCKVSNKALPAPIEKTISKAKGQPREPQVYTLPPSREEMTKNQVSLTCLVKGFYPSDIAVEWESNGQPENNYKTTPPVLDSDGSFFLYSKLTVDKSRWQQGNVFSCSVMHEALHNHYTQKSLSLSPGK

SEQ ID NO: 1938 - protein, 214 aa, Artificial Sequence
  Description of Artificial Sequence: Synthetic polypeptide
DIQMTQSPASLSASVGETVTITCRASENIYSYLAWYQQKQGKSPQFLVYNAKTLAAGVPSRFSGSGSGTQFSLKINRLQPEDFGTYYCQHHYGTPLTFGDGTRLEIKRTVAAPSVFIFPPSDEQLKSGTASVVCLLNNFYPREAKVQWKVDNALQSGNSQESVTEQDSKDSTYSLSSTLTLSKADYEKHKVYACEVTHQGLSSPVTKSFNRGEC

SEQ ID NO: 1939 - protein, 5 aa, Artificial Sequence
  Description of Artificial Sequence: Synthetic peptide
TYTMH

SEQ ID NO: 1940 - protein, 17 aa, Artificial Sequence
  Description of Artificial Sequence: Synthetic peptide
YINPSSGYTKYNQKFTD

SEQ ID NO: 1941 - protein, 4 aa, Artificial Sequence
  Description of Artificial Sequence: Synthetic peptide
LWAY

SEQ ID NO: 1942 - protein, 16 aa, Artificial Sequence
  Description of Artificial Sequence: Synthetic peptide
RSSQSLVHSSGNTYLH

SEQ ID NO: 1943 - protein, 7 aa, Artificial Sequence
  Description of Artificial Sequence: Synthetic peptide
KGSNRFS

SEQ ID NO: 1944 - protein, 9 aa, Artificial Sequence
  Description of Artificial Sequence: Synthetic peptide
SQSTHVPFT

SEQ ID NO: 1945 - protein, 7 aa, Artificial Sequence
  Description of Artificial Sequence: Synthetic peptide
GYTFTTY

SEQ ID NO: 1946 - protein, 6 aa, Artificial Sequence
  Description of Artificial Sequence: Synthetic peptide
NPSSGY

SEQ ID NO: 1947 - protein, 3 aa, Artificial Sequence
  Description of Artificial Sequence: Synthetic peptide
LWA

SEQ ID NO: 1948 - protein, 12 aa, Artificial Sequence
  Description of Artificial Sequence: Synthetic peptide
SQSLVHSSGNTY

SEQ ID NO: 1949 - protein, 3 aa, Artificial Sequence
  Description of Artificial Sequence: Synthetic peptide
KGS

SEQ ID NO: 1950 - protein, 6 aa, Artificial Sequence
  Description of Artificial Sequence: Synthetic peptide
STHVPF

SEQ ID NO: 1951 - protein, 10 aa, Artificial Sequence
  Description of Artificial Sequence: Synthetic peptide
GYTFTTYTMH

SEQ ID NO: 1952 - protein, 10 aa, Artificial Sequence
  Description of Artificial Sequence: Synthetic peptide
YINPSSGYTK

SEQ ID NO: 1953 - protein, 4 aa, Artificial Sequence
  Description of Artificial Sequence: Synthetic peptide
LWAY

SEQ ID NO: 1954 - protein, 16 aa, Artificial Sequence
  Description of Artificial Sequence: Synthetic peptide
RSSQSLVHSSGNTYLH

SEQ ID NO: 1955 - protein, 7 aa, Artificial Sequence
  Description of Artificial Sequence: Synthetic peptide
KGSNRFS

SEQ ID NO: 1956 - protein, 9 aa, Artificial Sequence
  Description of Artificial Sequence: Synthetic peptide
SQSTHVPFT

SEQ ID NO: 1957 - protein, 6 aa, Artificial Sequence
  Description of Artificial Sequence: Synthetic peptide
TTYTMH

SEQ ID NO: 1958 - protein, 13 aa, Artificial Sequence
  Description of Artificial Sequence: Synthetic peptide
WIGYINPSSGYTK

SEQ ID NO: 1959 - protein, 5 aa, Artificial Sequence
  Description of Artificial Sequence: Synthetic peptide
ARLWA

SEQ ID NO: 1960 - protein, 12 aa, Artificial Sequence
  Description of Artificial Sequence: Synthetic peptide
VHSSGNTYLHWY

SEQ ID NO: 1961 - protein, 10 aa, Artificial Sequence
  Description of Artificial Sequence: Synthetic peptide
LLIYKGSNRF

SEQ ID NO: 1962 - protein, 8 aa, Artificial Sequence
  Description of Artificial Sequence: Synthetic peptide
SQSTHVPF

SEQ ID NO: 1963 - protein, 8 aa, Artificial Sequence
  Description of Artificial Sequence: Synthetic peptide
GYTFTTYT

SEQ ID NO: 1964 - protein, 8 aa, Artificial Sequence
  Description of Artificial Sequence: Synthetic peptide
INPSSGYT

SEQ ID NO: 1965 - protein, 6 aa, Artificial Sequence
  Description of Artificial Sequence: Synthetic peptide
ARLWAY

SEQ ID NO: 1966 - protein, 11 aa, Artificial Sequence
  Description of Artificial Sequence: Synthetic peptide
QSLVHSSGNTY

SEQ ID NO: 1967 - protein, 3 aa, Artificial Sequence
  Description of Artificial Sequence: Synthetic peptide
KGS

SEQ ID NO: 1968 - protein, 9 aa, Artificial Sequence
  Description of Artificial Sequence: Synthetic peptide
SQSTHVPFT

SEQ ID NO: 1969 - protein, 113 aa, Artificial Sequence
  Description of Artificial Sequence: Synthetic polypeptide
EVQLQQSGAELARPGASVKMSCKASGYTFTTYTMHWVKQRPGQGLEWIGYINPSSGYTKYNQKFTDKATLTADKSSSTAYMQLSSLTSEDSAVYYCARLWAYWGQGTLVTVSA

SEQ ID NO: 1970 - protein, 112 aa, Artificial Sequence
  Description of Artificial Sequence: Synthetic polypeptide
DVVMTQTPLSLPVSLGDQASISCRSSQSLVHSSGNTYLHWYLQKPGQSPKLLIYKGSNRFSGVSDRFSGSGSGTDFTLKISRVEAEDLGVYFCSQSTHVPFTFGSGTKLEMK

SEQ ID NO: 1971 - protein, 443 aa, Artificial Sequence
  Description of Artificial Sequence: Synthetic polypeptide
EVQLQQSGAELARPGASVKMSCKASGYTFTTYTMHWVKQRPGQGLEWIGYINPSSGYTKYNQKFTDKATLTADKSSSTAYMQLSSLTSEDSAVYYCARLWAYWGQGTLVTVSAASTKGPSVFPLAPSSKSTSGGTAALGCLVKDYFPEPVTVSWNSGALTSGVHTFPAVLQSSGLYSLSSVVTVPSSSLGTQTYICNVNHKPSNTKVDKKVEPKSCDKTHTCPPCPAPELLGGPSVFLFPPKPKDTLMISRTPEVTCVVVDVSHEDPEVKFNWYVDGVEVHNAKTKPREEQYNSTYRVVSVLTVLHQDWLNGKEYKCKVSNKALPAPIEKTISKAKGQPREPQVYTLPPSREEMTKNQVSLTCLVKGFYPSDIAVEWESNGQPENNYKTTPPVLDSDGSFFLYSKLTVDKSRWQQGNVFSCSVMHEALHNHYTQKSLSLSPGK

SEQ ID NO: 1972 - protein, 219 aa, Artificial Sequence
  Description of Artificial Sequence: Synthetic polypeptide
DVVMTQTPLSLPVSLGDQASISCRSSQSLVHSSGNTYLHWYLQKPGQSPKLLIYKGSNRFSGVSDRFSGSGSGTDFTLKISRVEAEDLGVYFCSQSTHVPFTFGSGTKLEMKRTVAAPSVFIFPPSDEQLKSGTASVVCLLNNFYPREAKVQWKVDNALQSGNSQESVTEQDSKDSTYSLSSTLTLSKADYEKHKVYACEVTHQGLSSPVTKSFNRGEC

SEQ ID NO: 1973 - protein, 5 aa, Artificial Sequence
  Description of Artificial Sequence: Synthetic peptide
NYVVH

SEQ ID NO: 1974 - protein, 16 aa, Artificial Sequence
  Description of Artificial Sequence: Synthetic peptide
VIWTDGSTDYNAAFIS

SEQ ID NO: 1975 - protein, 11 aa, Artificial Sequence
  Description of Artificial Sequence: Synthetic peptide
NNGYFPAFFAY

SEQ ID NO: 1976 - protein, 11 aa, Artificial Sequence
  Description of Artificial Sequence: Synthetic peptide
KASQNVDTDIT

SEQ ID NO: 1977 - protein, 7 aa, Artificial Sequence
  Description of Artificial Sequence: Synthetic peptide
SASYRYS

SEQ ID NO: 1978 - protein, 9 aa, Artificial Sequence
  Description of Artificial Sequence: Synthetic peptide
QQYNSYPLT

SEQ ID NO: 1979 - protein, 7 aa, Artificial Sequence
  Description of Artificial Sequence: Synthetic peptide
GFSLSNY

SEQ ID NO: 1980 - protein, 5 aa, Artificial Sequence
  Description of Artificial Sequence: Synthetic peptide
WTDGS

SEQ ID NO: 1981 - protein, 10 aa, Artificial Sequence
  Description of Artificial Sequence: Synthetic peptide
NNGYFPAFFA

SEQ ID NO: 1982 - protein, 7 aa, Artificial Sequence
  Description of Artificial Sequence: Synthetic peptide
SQNVDTD

SEQ ID NO: 1983 - protein, 3 aa, Artificial Sequence
  Description of Artificial Sequence: Synthetic peptide
SAS

SEQ ID NO: 1984 - protein, 6 aa, Artificial Sequence
  Description of Artificial Sequence: Synthetic peptide
YNSYPL

SEQ ID NO: 1985 - protein, 10 aa, Artificial Sequence
  Description of Artificial Sequence: Synthetic peptide
GFSLSNYVVH

SEQ ID NO: 1986 - protein, 9 aa, Artificial Sequence
  Description of Artificial Sequence: Synthetic peptide
VIWTDGSTD

SEQ ID NO: 1987 - protein, 11 aa, Artificial Sequence
  Description of Artificial Sequence: Synthetic peptide
NNGYFPAFFAY

SEQ ID NO: 1988 - protein, 11 aa, Artificial Sequence
  Description of Artificial Sequence: Synthetic peptide
KASQNVDTDIT

SEQ ID NO: 1989 - protein, 7 aa, Artificial Sequence
  Description of Artificial Sequence: Synthetic peptide
SASYRYS

SEQ ID NO: 1990 - protein, 9 aa, Artificial Sequence
  Description of Artificial Sequence: Synthetic peptide
QQYNSYPLT

SEQ ID NO: 1991 - protein, 6 aa, Artificial Sequence
  Description of Artificial Sequence: Synthetic peptide
SNYVVH

SEQ ID NO: 1992 - protein, 12 aa, Artificial Sequence
  Description of Artificial Sequence: Synthetic peptide
WLGVIWTDGSTD

SEQ ID NO: 1993 - protein, 12 aa, Artificial Sequence
  Description of Artificial Sequence: Synthetic peptide
ARNNGYFPAFFA

SEQ ID NO: 1994 - protein, 7 aa, Artificial Sequence
  Description of Artificial Sequence: Synthetic peptide
DTDITWY

SEQ ID NO: 1995 - protein, 10 aa, Artificial Sequence
  Description of Artificial Sequence: Synthetic peptide
ALIYSASYRY

SEQ ID NO: 1996 - protein, 8 aa, Artificial Sequence
  Description of Artificial Sequence: Synthetic peptide
QQYNSYPL

SEQ ID NO: 1997 - protein, 8 aa, Artificial Sequence
  Description of Artificial Sequence: Synthetic peptide
GFSLSNYV

SEQ ID NO: 1998 - protein, 7 aa, Artificial Sequence
  Description of Artificial Sequence: Synthetic peptide
IWTDGST

SEQ ID NO: 1999 - protein, 13 aa, Artificial Sequence
  Description of Artificial Sequence: Synthetic peptide
ARNNGYFPAFFAY

SEQ ID NO: 2000 - protein, 6 aa, Artificial Sequence
  Description of Artificial Sequence: Synthetic peptide
QNVDTD

SEQ ID NO: 2001 - protein, 3 aa, Artificial Sequence
  Description of Artificial Sequence: Synthetic peptide
SAS

SEQ ID NO: 2002 - protein, 9 aa, Artificial Sequence
  Description of Artificial Sequence: Synthetic peptide
QQYNSYPLT

SEQ ID NO: 2003 - protein, 119 aa, Artificial Sequence
  Description of Artificial Sequence: Synthetic polypeptide
QVQLKESGPGLVAPSQSLSITCTVSGFSLSNYVVHWVRQSPGKGLEWLGVIWTDGSTDYNAAFISRLSISKDNSKSQVFFKMNSLQADDTAIYYCARNNGYFPAFFAYWGQGTLVTVSA

SEQ ID NO: 2004 - protein, 107 aa, Artificial Sequence
  Description of Artificial Sequence: Synthetic polypeptide
DIVMTQSQKFMSTSVGDRVSVTCKASQNVDTDITWYQQKPGQSPKALIYSASYRYSGVPDRFTGSGSGTDFTLTITNVQSEDLAEYFCQQYNSYPLTFGSGTKLEMK

SEQ ID NO: 2005 - protein, 449 aa, Artificial Sequence
  Description of Artificial Sequence: Synthetic polypeptide
QVQLKESGPGLVAPSQSLSITCTVSGFSLSNYVVHWVRQSPGKGLEWLGVIWTDGSTDYNAAFISRLSISKDNSKSQVFFKMNSLQADDTAIYYCARNNGYFPAFFAYWGQGTLVTVSAASTKGPSVFPLAPSSKSTSGGTAALGCLVKDYFPEPVTVSWNSGALTSGVHTFPAVLQSSGLYSLSSVVTVPSSSLGTQTYICNVNHKPSNTKVDKKVEPKSCDKTHTCPPCPAPELLGGPSVFLFPPKPKDTLMISRTPEVTCVVVDVSHEDPEVKFNWYVDGVEVHNAKTKPREEQYNSTYRVVSVLTVLHQDWLNGKEYKCKVSNKALPAPIEKTISKAKGQPREPQVYTLPPSREEMTKNQVSLTCLVKGFYPSDIAVEWESNGQPENNYKTTPPVLDSDGSFFLYSKLTVDKSRWQQGNVFSCSVMHEALHNHYTQKSLSLSPGK

SEQ ID NO: 2006 - protein, 214 aa, Artificial Sequence
  Description of Artificial Sequence: Synthetic polypeptide
DIVMTQSQKFMSTSVGDRVSVTCKASQNVDTDITWYQQKPGQSPKALIYSASYRYSGVPDRFTGSGSGTDFTLTITNVQSEDLAEYFCQQYNSYPLTFGSGTKLEMKRTVAAPSVFIFPPSDEQLKSGTASVVCLLNNFYPREAKVQWKVDNALQSGNSQESVTEQDSKDSTYSLSSTLTLSKADYEKHKVYACEVTHQGLSSPVTKSFNRGEC

SEQ ID NO: 2007 - protein, 5 aa, Artificial Sequence
  Description of Artificial Sequence: Synthetic peptide
SYWIT

SEQ ID NO: 2008 - protein, 17 aa, Artificial Sequence
  Description of Artificial Sequence: Synthetic peptide
DIYPGSGSTNYNEKFKS

SEQ ID NO: 2009 - protein, 12 aa, Artificial Sequence
  Description of Artificial Sequence: Synthetic peptide
ESITTRITPFDH

SEQ ID NO: 2010 - protein, 16 aa, Artificial Sequence
  Description of Artificial Sequence: Synthetic peptide
RSSQSLVHSSGNTYLH

SEQ ID NO: 2011 - protein, 7 aa, Artificial Sequence
  Description of Artificial Sequence: Synthetic peptide
KGSNRFS

SEQ ID NO: 2012 - protein, 9 aa, Artificial Sequence
  Description of Artificial Sequence: Synthetic peptide
SQSTHVPFT

SEQ ID NO: 2013 - protein, 7 aa, Artificial Sequence
  Description of Artificial Sequence: Synthetic peptide
GYTFSSY

SEQ ID NO: 2014 - protein, 6 aa, Artificial Sequence
  Description of Artificial Sequence: Synthetic peptide
YPGSGS

SEQ ID NO: 2015 - protein, 11 aa, Artificial Sequence
  Description of Artificial Sequence: Synthetic peptide
ESITTRITPFD

SEQ ID NO: 2016 - protein, 12 aa, Artificial Sequence
  Description of Artificial Sequence: Synthetic peptide
SQSLVHSSGNTY

SEQ ID NO: 2017 - protein, 3 aa, Artificial Sequence
  Description of Artificial Sequence: Synthetic peptide
KGS

SEQ ID NO: 2018 - protein, 6 aa, Artificial Sequence
  Description of Artificial Sequence: Synthetic peptide
STHVPF

SEQ ID NO: 2019 - protein, 10 aa, Artificial Sequence
  Description of Artificial Sequence: Synthetic peptide
GYTFSSYWIT

SEQ ID NO: 2020 - protein, 10 aa, Artificial Sequence
  Description of Artificial Sequence: Synthetic peptide
DIYPGSGSTN

SEQ ID NO: 2021 - protein, 12 aa, Artificial Sequence
  Description of Artificial Sequence: Synthetic peptide
ESITTRITPFDH

SEQ ID NO: 2022 - protein, 16 aa, Artificial Sequence
  Description of Artificial Sequence: Synthetic peptide
RSSQSLVHSSGNTYLH

SEQ ID NO: 2023 - protein, 7 aa, Artificial Sequence
  Description of Artificial Sequence: Synthetic peptide
KGSNRFS

SEQ ID NO: 2024 - protein, 9 aa, Artificial Sequence
  Description of Artificial Sequence: Synthetic peptide
SQSTHVPFT

SEQ ID NO: 2025 - protein, 6 aa, Artificial Sequence
  Description of Artificial Sequence: Synthetic peptide
SSYWIT

SEQ ID NO: 2026 - protein, 13 aa, Artificial Sequence
  Description of Artificial Sequence: Synthetic peptide
WVGDIYPGSGSTN

SEQ ID NO: 2027 - protein, 13 aa, Artificial Sequence
  Description of Artificial Sequence: Synthetic peptide
ARESITTRITPFD

SEQ ID NO: 2028 - protein, 12 aa, Artificial Sequence
  Description of Artificial Sequence: Synthetic peptide
VHSSGNTYLHWY

SEQ ID NO: 2029 - protein, 10 aa, Artificial Sequence
  Description of Artificial Sequence: Synthetic peptide
LLIYKGSNRF

SEQ ID NO: 2030 - protein, 8 aa, Artificial Sequence
  Description of Artificial Sequence: Synthetic peptide
SQSTHVPF

SEQ ID NO: 2031 - protein, 8 aa, Artificial Sequence
  Description of Artificial Sequence: Synthetic peptide
GYTFSSYW

SEQ ID NO: 2032 - protein, 8 aa, Artificial Sequence
  Description of Artificial Sequence: Synthetic peptide
IYPGSGST

SEQ ID NO: 2033 - protein, 14 aa, Artificial Sequence
  Description of Artificial Sequence: Synthetic peptide
ARESITTRITPFDH

SEQ ID NO: 2034 - protein, 11 aa, Artificial Sequence
  Description of Artificial Sequence: Synthetic peptide
QSLVHSSGNTY

SEQ ID NO: 2035 - protein, 3 aa, Artificial Sequence
  Description of Artificial Sequence: Synthetic peptide
KGS

SEQ ID NO: 2036 - protein, 9 aa, Artificial Sequence
  Description of Artificial Sequence: Synthetic peptide
SQSTHVPFT

SEQ ID NO: 2037 - protein, 121 aa, Artificial Sequence
  Description of Artificial Sequence: Synthetic polypeptide
EVQLQQSGAELVKPGASVKMSCKTSGYTFSSYWITWVKQRPGQGLEWVGDIYPGSGSTNYNEKFKSKAALTVDTSSSTAFMQLNSLTSEDSAVYYCARESITTRITPFDHWGQGTTLTVSS

SEQ ID NO: 2038 - protein, 112 aa, Artificial Sequence
  Description of Artificial Sequence: Synthetic polypeptide
DVVMTQTPLSLPVSLGDQASISCRSSQSLVHSSGNTYLHWYLQKPGQSPKLLIYKGSNRFSGVSDRFSGSGSGTDFTLKISRVEAEDLGVYFCSQSTHVPFTFGSGTKLEIK

SEQ ID NO: 2039 - protein, 451 aa, Artificial Sequence
  Description of Artificial Sequence: Synthetic polypeptide
EVQLQQSGAELVKPGASVKMSCKTSGYTFSSYWITWVKQRPGQGLEWVGDIYPGSGSTNYNEKFKSKAALTVDTSSSTAFMQLNSLTSEDSAVYYCARESITTRITPFDHWGQGTTLTVSSASTKGPSVFPLAPSSKSTSGGTAALGCLVKDYFPEPVTVSWNSGALTSGVHTFPAVLQSSGLYSLSSVVTVPSSSLGTQTYICNVNHKPSNTKVDKKVEPKSCDKTHTCPPCPAPELLGGPSVFLFPPKPKDTLMISRTPEVTCVVVDVSHEDPEVKFNWYVDGVEVHNAKTKPREEQYNSTYRVVSVLTVLHQDWLNGKEYKCKVSNKALPAPIEKTISKAKGQPREPQVYTLPPSREEMTKNQVSLTCLVKGFYPSDIAVEWESNGQPENNYKTTPPVLDSDGSFFLYSKLTVDKSRWQQGNVFSCSVMHEALHNHYTQKSLSLSPGK

SEQ ID NO: 2040 - protein, 219 aa, Artificial Sequence
  Description of Artificial Sequence: Synthetic polypeptide
DVVMTQTPLSLPVSLGDQASISCRSSQSLVHSSGNTYLHWYLQKPGQSPKLLIYKGSNRFSGVSDRFSGSGSGTDFTLKISRVEAEDLGVYFCSQSTHVPFTFGSGTKLEIKRTVAAPSVFIFPPSDEQLKSGTASVVCLLNNFYPREAKVQWKVDNALQSGNSQESVTEQDSKDSTYSLSSTLTLSKADYEKHKVYACEVTHQGLSSPVTKSFNRGEC

SEQ ID NO: 2041 - protein, 5 aa, Artificial Sequence
  Description of Artificial Sequence: Synthetic peptide
SYWIN

SEQ ID NO: 2042 - protein, 17 aa, Artificial Sequence
  Description of Artificial Sequence: Synthetic peptide
NIYPGSSSTNYNEKFKS

SEQ ID NO: 2043 - protein, 13 aa, Artificial Sequence
  Description of Artificial Sequence: Synthetic peptide
ELGGYYRYNAMDY

SEQ ID NO: 2044 - protein, 11 aa, Artificial Sequence
  Description of Artificial Sequence: Synthetic peptide
KASQDINRYLS

SEQ ID NO: 2045 - protein, 7 aa, Artificial Sequence
  Description of Artificial Sequence: Synthetic peptide
RANTLVD

SEQ ID NO: 2046 - protein, 9 aa, Artificial Sequence
  Description of Artificial Sequence: Synthetic peptide
LQYDEFPYT

SEQ ID NO: 2047 - protein, 7 aa, Artificial Sequence
  Description of Artificial Sequence: Synthetic peptide
GYTFNSY

SEQ ID NO: 2048 - protein, 6 aa, Artificial Sequence
  Description of Artificial Sequence: Synthetic peptide
YPGSSS

SEQ ID NO: 2049 - protein, 12 aa, Artificial Sequence
  Description of Artificial Sequence: Synthetic peptide
ELGGYYRYNAMD

SEQ ID NO: 2050 - protein, 7 aa, Artificial Sequence
  Description of Artificial Sequence: Synthetic peptide
SQDINRY

SEQ ID NO: 2051 - protein, 3 aa, Artificial Sequence
  Description of Artificial Sequence: Synthetic peptide
RAN

SEQ ID NO: 2052 - protein, 6 aa, Artificial Sequence
  Description of Artificial Sequence: Synthetic peptide
YDEFPY

SEQ ID NO: 2053 - protein, 10 aa, Artificial Sequence
  Description of Artificial Sequence: Synthetic peptide
GYTFNSYWIN

SEQ ID NO: 2054 - protein, 10 aa, Artificial Sequence
  Description of Artificial Sequence: Synthetic peptide
NIYPGSSSTN

SEQ ID NO: 2055 - protein, 13 aa, Artificial Sequence
  Description of Artificial Sequence: Synthetic peptide
ELGGYYRYNAMDY

SEQ ID NO: 2056 - protein, 11 aa, Artificial Sequence
  Description of Artificial Sequence: Synthetic peptide
KASQDINRYLS

SEQ ID NO: 2057 - protein, 7 aa, Artificial Sequence
  Description of Artificial Sequence: Synthetic peptide
RANTLVD

SEQ ID NO: 2058 - protein, 9 aa, Artificial Sequence
  Description of Artificial Sequence: Synthetic peptide
LQYDEFPYT

SEQ ID NO: 2059 - protein, 6 aa, Artificial Sequence
  Description of Artificial Sequence: Synthetic peptide
NSYWIN

SEQ ID NO: 2060 - protein, 13 aa, Artificial Sequence
  Description of Artificial Sequence: Synthetic peptide
WIGNIYPGSSSTN

SEQ ID NO: 2061 - protein, 14 aa, Artificial Sequence
  Description of Artificial Sequence: Synthetic peptide
ARELGGYYRYNAMD

SEQ ID NO: 2062 - protein, 7 aa, Artificial Sequence
  Description of Artificial Sequence: Synthetic peptide
NRYLSWF

SEQ ID NO: 2063 - protein, 10 aa, Artificial Sequence
  Description of Artificial Sequence: Synthetic peptide
TLIYRANTLV

SEQ ID NO: 2064 - protein, 8 aa, Artificial Sequence
  Description of Artificial Sequence: Synthetic peptide
LQYDEFPY

SEQ ID NO: 2065 - protein, 8 aa, Artificial Sequence
  Description of Artificial Sequence: Synthetic peptide
GYTFNSYW

SEQ ID NO: 2066 - protein, 8 aa, Artificial Sequence
  Description of Artificial Sequence: Synthetic peptide
IYPGSSST

SEQ ID NO: 2067 - protein, 15 aa, Artificial Sequence
  Description of Artificial Sequence: Synthetic peptide
ARELGGYYRYNAMDY

SEQ ID NO: 2068 - protein, 6 aa, Artificial Sequence
  Description of Artificial Sequence: Synthetic peptide
QDINRY

SEQ ID NO: 2069 - protein, 3 aa, Artificial Sequence
  Description of Artificial Sequence: Synthetic peptide
RAN

SEQ ID NO: 2070 - protein, 9 aa, Artificial Sequence
  Description of Artificial Sequence: Synthetic peptide
LQYDEFPYT

SEQ ID NO: 2071 - protein, 122 aa, Artificial Sequence
  Description of Artificial Sequence: Synthetic polypeptide
QVQLQQPGAELVKPGASVKLSCKASGYTFNSYWINWMKQRPGQGLEWIGNIYPGSSSTNYNEKFKSKATLTVDTSSSTAYMQLSSLTSDDSAVYYCARELGGYYRYNAMDYWGQGTSVTVSS

SEQ ID NO: 2072 - protein, 107 aa, Artificial Sequence
  Description of Artificial Sequence: Synthetic polypeptide
DIVLTQSPSSMYASLGERVTITCKASQDINRYLSWFQQKPGKSPKTLIYRANTLVDGVPSRFSGSGSGQDYSLTISSLEYEDMGIYYCLQYDEFPYTFGSGTKLEMK

SEQ ID NO: 2073 - protein, 452 aa, Artificial Sequence
  Description of Artificial Sequence: Synthetic polypeptide
QVQLQQPGAELVKPGASVKLSCKASGYTFNSYWINWMKQRPGQGLEWIGNIYPGSSSTNYNEKFKSKATLTVDTSSSTAYMQLSSLTSDDSAVYYCARELGGYYRYNAMDYWGQGTSVTVSSASTKGPSVFPLAPSSKSTSGGTAALGCLVKDYFPEPVTVSWNSGALTSGVHTFPAVLQSSGLYSLSSVVTVPSSSLGTQTYICNVNHKPSNTKVDKKVEPKSCDKTHTCPPCPAPELLGGPSVFLFPPKPKDTLMISRTPEVTCVVVDVSHEDPEVKFNWYVDGVEVHNAKTKPREEQYNSTYRVVSVLTVLHQDWLNGKEYKCKVSNKALPAPIEKTISKAKGQPREPQVYTLPPSREEMTKNQVSLTCLVKGFYPSDIAVEWESNGQPENNYKTTPPVLDSDGSFFLYSKLTVDKSRWQQGNVFSCSVMHEALHNHYTQKSLSLSPGK

SEQ ID NO: 2074 - protein, 214 aa, Artificial Sequence
  Description of Artificial Sequence: Synthetic polypeptide
DIVLTQSPSSMYASLGERVTITCKASQDINRYLSWFQQKPGKSPKTLIYRANTLVDGVPSRFSGSGSGQDYSLTISSLEYEDMGIYYCLQYDEFPYTFGSGTKLEMKRTVAAPSVFIFPPSDEQLKSGTASVVCLLNNFYPREAKVQWKVDNALQSGNSQESVTEQDSKDSTYSLSSTLTLSKADYEKHKVYACEVTHQGLSSPVTKSFNRGEC

SEQ ID NO: 2075 - protein, 5 aa, Artificial Sequence
  Description of Artificial Sequence: Synthetic peptide
SYWMH

SEQ ID NO: 2076 - protein, 17 aa, Artificial Sequence
  Description of Artificial Sequence: Synthetic peptide
MIHPNSGSTNYNEKFKS

SEQ ID NO: 2077 - protein, 10 aa, Artificial Sequence
  Description of Artificial Sequence: Synthetic peptide
CGYDGAWFAY

SEQ ID NO: 2078 - protein, 11 aa, Artificial Sequence
  Description of Artificial Sequence: Synthetic peptide
SASQGISNCLN

SEQ ID NO: 2079 - protein, 7 aa, Artificial Sequence
  Description of Artificial Sequence: Synthetic peptide
YTSSLHS

SEQ ID NO: 2080 - protein, 9 aa, Artificial Sequence
  Description of Artificial Sequence: Synthetic peptide
QQYSKVPYT

SEQ ID NO: 2081 - protein, 7 aa, Artificial Sequence
  Description of Artificial Sequence: Synthetic peptide
GYTFTSY

SEQ ID NO: 2082 - protein, 6 aa, Artificial Sequence
  Description of Artificial Sequence: Synthetic peptide
HPNSGS

SEQ ID NO: 2083 - protein, 9 aa, Artificial Sequence
  Description of Artificial Sequence: Synthetic peptide
CGYDGAWFA

SEQ ID NO: 2084 - protein, 7 aa, Artificial Sequence
  Description of Artificial Sequence: Synthetic peptide
SQGISNC

SEQ ID NO: 2085 - protein, 3 aa, Artificial Sequence
  Description of Artificial Sequence: Synthetic peptide
YTS

SEQ ID NO: 2086 - protein, 6 aa, Artificial Sequence
  Description of Artificial Sequence: Synthetic peptide
YSKVPY

SEQ ID NO: 2087 - protein, 10 aa, Artificial Sequence
  Description of Artificial Sequence: Synthetic peptide
GYTFTSYWMH

SEQ ID NO: 2088 - protein, 10 aa, Artificial Sequence
  Description of Artificial Sequence: Synthetic peptide
MIHPNSGSTN

SEQ ID NO: 2089 - protein, 10 aa, Artificial Sequence
  Description of Artificial Sequence: Synthetic peptide
CGYDGAWFAY

SEQ ID NO: 2090 - protein, 11 aa, Artificial Sequence
  Description of Artificial Sequence: Synthetic peptide
SASQGISNCLN

SEQ ID NO: 2091 - protein, 7 aa, Artificial Sequence
  Description of Artificial Sequence: Synthetic peptide
YTSSLHS

SEQ ID NO: 2092 - protein, 9 aa, Artificial Sequence
  Description of Artificial Sequence: Synthetic peptide
QQYSKVPYT

SEQ ID NO: 2093 - protein, 6 aa, Artificial Sequence
  Description of Artificial Sequence: Synthetic peptide
TSYWMH

SEQ ID NO: 2094 - protein, 13 aa, Artificial Sequence
  Description of Artificial Sequence: Synthetic peptide
WIGMIHPNSGSTN

SEQ ID NO: 2095 - protein, 11 aa, Artificial Sequence
  Description of Artificial Sequence: Synthetic peptide
ARCGYDGAWFA

SEQ ID NO: 2096 - protein, 7 aa, Artificial Sequence
  Description of Artificial Sequence: Synthetic peptide
SNCLNWY

SEQ ID NO: 2097 - protein, 10 aa, Artificial Sequence
  Description of Artificial Sequence: Synthetic peptide
LLIHYTSSLH

SEQ ID NO: 2098 - protein, 8 aa, Artificial Sequence
  Description of Artificial Sequence: Synthetic peptide
QQYSKVPY

SEQ ID NO: 2099 - protein, 8 aa, Artificial Sequence
  Description of Artificial Sequence: Synthetic peptide
GYTFTSYW

SEQ ID NO: 2100 - protein, 8 aa, Artificial Sequence
  Description of Artificial Sequence: Synthetic peptide
IHPNSGST

SEQ ID NO: 2101 - protein, 12 aa, Artificial Sequence
  Description of Artificial Sequence: Synthetic peptide
ARCGYDGAWFAY

SEQ ID NO: 2102 - protein, 6 aa, Artificial Sequence
  Description of Artificial Sequence: Synthetic peptide
QGISNC

SEQ ID NO: 2103 - protein, 3 aa, Artificial Sequence
  Description of Artificial Sequence: Synthetic peptide
YTS

SEQ ID NO: 2104 - protein, 9 aa, Artificial Sequence
  Description of Artificial Sequence: Synthetic peptide
QQYSKVPYT

SEQ ID NO: 2105 - protein, 119 aa, Artificial Sequence
  Description of Artificial Sequence: Synthetic polypeptide
QVQLKESGPELVKPGASVKLSCKASGYTFTSYWMHWVKQRPGQGLEWIGMIHPNSGSTNYNEKFKSKATLTVDKSSSTAYMQLSSLTSEDSAVYYCARCGYDGAWFAYWGQGTSVTVSS

SEQ ID NO: 2106 - protein, 107 aa, Artificial Sequence
  Description of Artificial Sequence: Synthetic polypeptide
DIQMTQTTSSLSASLGDRVTISCSASQGISNCLNWYQQKPDGTVKLLIHYTSSLHSGVPSRFSGGGSGTHYSLTISNLEPEDIATYYCQQYSKVPYTFGSGTKLEIK

SEQ ID NO: 2107 - protein, 449 aa, Artificial Sequence
  Description of Artificial Sequence: Synthetic polypeptide
QVQLKESGPELVKPGASVKLSCKASGYTFTSYWMHWVKQRPGQGLEWIGMIHPNSGSTNYNEKFKSKATLTVDKSSSTAYMQLSSLTSEDSAVYYCARCGYDGAWFAYWGQGTSVTVSSASTKGPSVFPLAPSSKSTSGGTAALGCLVKDYFPEPVTVSWNSGALTSGVHTFPAVLQSSGLYSLSSVVTVPSSSLGTQTYICNVNHKPSNTKVDKKVEPKSCDKTHTCPPCPAPELLGGPSVFLFPPKPKDTLMISRTPEVTCVVVDVSHEDPEVKFNWYVDGVEVHNAKTKPREEQYNSTYRVVSVLTVLHQDWLNGKEYKCKVSNKALPAPIEKTISKAKGQPREPQVYTLPPSREEMTKNQVSLTCLVKGFYPSDIAVEWESNGQPENNYKTTPPVLDSDGSFFLYSKLTVDKSRWQQGNVFSCSVMHEALHNHYTQKSLSLSPGK

SEQ ID NO: 2108 - protein, 214 aa, Artificial Sequence
  Description of Artificial Sequence: Synthetic polypeptide
DIQMTQTTSSLSASLGDRVTISCSASQGISNCLNWYQQKPDGTVKLLIHYTSSLHSGVPSRFSGGGSGTHYSLTISNLEPEDIATYYCQQYSKVPYTFGSGTKLEIKRTVAAPSVFIFPPSDEQLKSGTASVVCLLNNFYPREAKVQWKVDNALQSGNSQESVTEQDSKDSTYSLSSTLTLSKADYEKHKVYACEVTHQGLSSPVTKSFNRGEC

SEQ ID NO: 2109 - protein, 5 aa, Artificial Sequence
  Description of Artificial Sequence: Synthetic peptide
NYWMQ

SEQ ID NO: 2110 - protein, 17 aa, Artificial Sequence
  Description of Artificial Sequence: Synthetic peptide
EIDPSDTFTNYNQNFKD

SEQ ID NO: 2111 - protein, 11 aa, Artificial Sequence
  Description of Artificial Sequence: Synthetic peptide
GDWDRDWYFDV

SEQ ID NO: 2112 - protein, 16 aa, Artificial Sequence
  Description of Artificial Sequence: Synthetic peptide
KSSQSLLYSDGKTYLN

SEQ ID NO: 2113 - protein, 7 aa, Artificial Sequence
  Description of Artificial Sequence: Synthetic peptide
LVSKLDS

SEQ ID NO: 2114 - protein, 9 aa, Artificial Sequence
  Description of Artificial Sequence: Synthetic peptide
LQATHFPHT

SEQ ID NO: 2115 - protein, 7 aa, Artificial Sequence
  Description of Artificial Sequence: Synthetic peptide
GYTFTNY

SEQ ID NO: 2116 - protein, 6 aa, Artificial Sequence
  Description of Artificial Sequence: Synthetic peptide
DPSDTF

SEQ ID NO: 2117 - protein, 10 aa, Artificial Sequence
  Description of Artificial Sequence: Synthetic peptide
GDWDRDWYFD

SEQ ID NO: 2118 - protein, 12 aa, Artificial Sequence
  Description of Artificial Sequence: Synthetic peptide
SQSLLYSDGKTY

SEQ ID NO: 2119 - protein, 3 aa, Artificial Sequence
  Description of Artificial Sequence: Synthetic peptide
LVS

SEQ ID NO: 2120 - protein, 6 aa, Artificial Sequence
  Description of Artificial Sequence: Synthetic peptide
ATHFPH

SEQ ID NO: 2121 - protein, 10 aa, Artificial Sequence
  Description of Artificial Sequence: Synthetic peptide
GYTFTNYWMQ

SEQ ID NO: 2122 - protein, 10 aa, Artificial Sequence
  Description of Artificial Sequence: Synthetic peptide
EIDPSDTFTN

SEQ ID NO: 2123 - protein, 11 aa, Artificial Sequence
  Description of Artificial Sequence: Synthetic peptide
GDWDRDWYFDV

SEQ ID NO: 2124 - protein, 16 aa, Artificial Sequence
  Description of Artificial Sequence: Synthetic peptide
KSSQSLLYSDGKTYLN

SEQ ID NO: 2125 - protein, 7 aa, Artificial Sequence
  Description of Artificial Sequence: Synthetic peptide
LVSKLDS

SEQ ID NO: 2126 - protein, 9 aa, Artificial Sequence
  Description of Artificial Sequence: Synthetic peptide
LQATHFPHT

SEQ ID NO: 2127 - protein, 6 aa, Artificial Sequence
  Description of Artificial Sequence: Synthetic peptide
TNYWMQ

SEQ ID NO: 2128 - protein, 13 aa, Artificial Sequence
  Description of Artificial Sequence: Synthetic peptide
WIGEIDPSDTFTN

SEQ ID NO: 2129 - protein, 12 aa, Artificial Sequence
  Description of Artificial Sequence: Synthetic peptide
ARGDWDRDWYFD

SEQ ID NO: 2130 - protein, 12 aa, Artificial Sequence
  Description of Artificial Sequence: Synthetic peptide
LYSDGKTYLNWL

SEQ ID NO: 2131 - protein, 10 aa, Artificial Sequence
  Description of Artificial Sequence: Synthetic peptide
LLIYLVSKLD

SEQ ID NO: 2132 - protein, 8 aa, Artificial Sequence
  Description of Artificial Sequence: Synthetic peptide
LQATHFPH

SEQ ID NO: 2133 - protein, 8 aa, Artificial Sequence
  Description of Artificial Sequence: Synthetic peptide
GYTFTNYW

SEQ ID NO: 2134 - protein, 8 aa, Artificial Sequence
  Description of Artificial Sequence: Synthetic peptide
IDPSDTFT

SEQ ID NO: 2135 - protein, 13 aa, Artificial Sequence
  Description of Artificial Sequence: Synthetic peptide
ARGDWDRDWYFDV

SEQ ID NO: 2136 - protein, 11 aa, Artificial Sequence
  Description of Artificial Sequence: Synthetic peptide
QSLLYSDGKTY

SEQ ID NO: 2137 - protein, 3 aa, Artificial Sequence
  Description of Artificial Sequence: Synthetic peptide
LVS

SEQ ID NO: 2138 - protein, 9 aa, Artificial Sequence
  Description of Artificial Sequence: Synthetic peptide
LQATHFPHT

SEQ ID NO: 2139 - protein, 120 aa, Artificial Sequence
  Description of Artificial Sequence: Synthetic polypeptide
QVQLQQPGAELVKPGASVRLSCKASGYTFTNYWMQWVQQRPGQGLEWIGEIDPSDTFTNYNQNFKDKATLTVDTSSSTAYLQLSSLTSEDSAVYYCARGDWDRDWYFDVWGTGTLVTVSA

SEQ ID NO: 2140 - protein, 112 aa, Artificial Sequence
  Description of Artificial Sequence: Synthetic polypeptide
DIVMTQTPLTLSVTIGQPASISCKSSQSLLYSDGKTYLNWLLQRPGESPKLLIYLVSKLDSGVPDRFTGSGSGTDFTLKISRVETEDLGIYYCLQATHFPHTFGAGTKLELK

SEQ ID NO: 2141 - protein, 450 aa, Artificial Sequence
  Description of Artificial Sequence: Synthetic polypeptide
QVQLQQPGAELVKPGASVRLSCKASGYTFTNYWMQWVQQRPGQGLEWIGEIDPSDTFTNYNQNFKDKATLTVDTSSSTAYLQLSSLTSEDSAVYYCARGDWDRDWYFDVWGTGTLVTVSAASTKGPSVFPLAPSSKSTSGGTAALGCLVKDYFPEPVTVSWNSGALTSGVHTFPAVLQSSGLYSLSSVVTVPSSSLGTQTYICNVNHKPSNTKVDKKVEPKSCDKTHTCPPCPAPELLGGPSVFLFPPKPKDTLMISRTPEVTCVVVDVSHEDPEVKFNWYVDGVEVHNAKTKPREEQYNSTYRVVSVLTVLHQDWLNGKEYKCKVSNKALPAPIEKTISKAKGQPREPQVYTLPPSREEMTKNQVSLTCLVKGFYPSDIAVEWESNGQPENNYKTTPPVLDSDGSFFLYSKLTVDKSRWQQGNVFSCSVMHEALHNHYTQKSLSLSPGK

SEQ ID NO: 2142 - protein, 219 aa, Artificial Sequence
  Description of Artificial Sequence: Synthetic polypeptide
DIVMTQTPLTLSVTIGQPASISCKSSQSLLYSDGKTYLNWLLQRPGESPKLLIYLVSKLDSGVPDRFTGSGSGTDFTLKISRVETEDLGIYYCLQATHFPHTFGAGTKLELKRTVAAPSVFIFPPSDEQLKSGTASVVCLLNNFYPREAKVQWKVDNALQSGNSQESVTEQDSKDSTYSLSSTLTLSKADYEKHKVYACEVTHQGLSSPVTKSFNRGEC

SEQ ID NO: 2143 - protein, 5 aa, Artificial Sequence
  Description of Artificial Sequence: Synthetic peptide
DTYMH

SEQ ID NO: 2144 - protein, 17 aa, Artificial Sequence
  Description of Artificial Sequence: Synthetic peptide
RIDPANGHTKFDPKFQG

SEQ ID NO: 2145 - protein, 4 aa, Artificial Sequence
  Description of Artificial Sequence: Synthetic peptide
RFAY

SEQ ID NO: 2146 - protein, 11 aa, Artificial Sequence
  Description of Artificial Sequence: Synthetic peptide
RASHEISGYLS

SEQ ID NO: 2147 - protein, 7 aa, Artificial Sequence
  Description of Artificial Sequence: Synthetic peptide
AASTLDS

SEQ ID NO: 2148 - protein, 9 aa, Artificial Sequence
  Description of Artificial Sequence: Synthetic peptide
LQYSSYPYT

SEQ ID NO: 2149 - protein, 7 aa, Artificial Sequence
  Description of Artificial Sequence: Synthetic peptide
GFNIKDT

SEQ ID NO: 2150 - protein, 6 aa, Artificial Sequence
  Description of Artificial Sequence: Synthetic peptide
DPANGH

SEQ ID NO: 2151 - protein, 3 aa, Artificial Sequence
  Description of Artificial Sequence: Synthetic peptide
RFA

SEQ ID NO: 2152 - protein, 7 aa, Artificial Sequence
  Description of Artificial Sequence: Synthetic peptide
SHEISGY

SEQ ID NO: 2153 - protein, 3 aa, Artificial Sequence
  Description of Artificial Sequence: Synthetic peptide
AAS

SEQ ID NO: 2154 - protein, 6 aa, Artificial Sequence
  Description of Artificial Sequence: Synthetic peptide
YSSYPY

SEQ ID NO: 2155 - protein, 10 aa, Artificial Sequence
  Description of Artificial Sequence: Synthetic peptide
GFNIKDTYMH

SEQ ID NO: 2156 - protein, 10 aa, Artificial Sequence
  Description of Artificial Sequence: Synthetic peptide
RIDPANGHTK

SEQ ID NO: 2157 - protein, 4 aa, Artificial Sequence
  Description of Artificial Sequence: Synthetic peptide
RFAY

SEQ ID NO: 2158 - protein, 11 aa, Artificial Sequence
  Description of Artificial Sequence: Synthetic peptide
RASHEISGYLS

SEQ ID NO: 2159 - protein, 7 aa, Artificial Sequence
  Description of Artificial Sequence: Synthetic peptide
AASTLDS

SEQ ID NO: 2160 - protein, 9 aa, Artificial Sequence
  Description of Artificial Sequence: Synthetic peptide
LQYSSYPYT

SEQ ID NO: 2161 - protein, 6 aa, Artificial Sequence
  Description of Artificial Sequence: Synthetic peptide
KDTYMH

SEQ ID NO: 2162 - protein, 13 aa, Artificial Sequence
  Description of Artificial Sequence: Synthetic peptide
WIGRIDPANGHTK

SEQ ID NO: 2163 - protein, 5 aa, Artificial Sequence
  Description of Artificial Sequence: Synthetic peptide
AIRFA

SEQ ID NO: 2164 - protein, 7 aa, Artificial Sequence
  Description of Artificial Sequence: Synthetic peptide
SGYLSWL

SEQ ID NO: 2165 - protein, 10 aa, Artificial Sequence
  Description of Artificial Sequence: Synthetic peptide
RLIYAASTLD

SEQ ID NO: 2166 - protein, 8 aa, Artificial Sequence
  Description of Artificial Sequence: Synthetic peptide
LQYSSYPY

SEQ ID NO: 2167 - protein, 8 aa, Artificial Sequence
  Description of Artificial Sequence: Synthetic peptide
GFNIKDTY

SEQ ID NO: 2168 - protein, 8 aa, Artificial Sequence
  Description of Artificial Sequence: Synthetic peptide
IDPANGHT

SEQ ID NO: 2169 - protein, 6 aa, Artificial Sequence
  Description of Artificial Sequence: Synthetic peptide
AIRFAY

SEQ ID NO: 2170 - protein, 6 aa, Artificial Sequence
  Description of Artificial Sequence: Synthetic peptide
HEISGY

SEQ ID NO: 2171 - protein, 3 aa, Artificial Sequence
  Description of Artificial Sequence: Synthetic peptide
AAS

SEQ ID NO: 2172 - protein, 9 aa, Artificial Sequence
  Description of Artificial Sequence: Synthetic peptide
LQYSSYPYT

SEQ ID NO: 2173 - protein, 113 aa, Artificial Sequence
  Description of Artificial Sequence: Synthetic polypeptide
EVKLVESGAELVKPGASVKLSCTASGFNIKDTYMHWVKQRPEQGLEWIGRIDPANGHTKFDPKFQGKATITADTSSNTAYLQLSSLTSEDTAVYYCAIRFAYWGQGTLVTVSA

SEQ ID NO: 2174 - protein, 107 aa, Artificial Sequence
  Description of Artificial Sequence: Synthetic polypeptide
DIQMTQSPSSLSASLGDRVSLTCRASHEISGYLSWLQQKPDGTFKRLIYAASTLDSGVPKRFSGSRSGSDYSLSISSLESEDFADYYCLQYSSYPYTFGSGTKLEMK

SEQ ID NO: 2175 - protein, 443 aa, Artificial Sequence
  Description of Artificial Sequence: Synthetic polypeptide
EVKLVESGAELVKPGASVKLSCTASGFNIKDTYMHWVKQRPEQGLEWIGRIDPANGHTKFDPKFQGKATITADTSSNTAYLQLSSLTSEDTAVYYCAIRFAYWGQGTLVTVSAASTKGPSVFPLAPSSKSTSGGTAALGCLVKDYFPEPVTVSWNSGALTSGVHTFPAVLQSSGLYSLSSVVTVPSSSLGTQTYICNVNHKPSNTKVDKKVEPKSCDKTHTCPPCPAPELLGGPSVFLFPPKPKDTLMISRTPEVTCVVVDVSHEDPEVKFNWYVDGVEVHNAKTKPREEQYNSTYRVVSVLTVLHQDWLNGKEYKCKVSNKALPAPIEKTISKAKGQPREPQVYTLPPSREEMTKNQVSLTCLVKGFYPSDIAVEWESNGQPENNYKTTPPVLDSDGSFFLYSKLTVDKSRWQQGNVFSCSVMHEALHNHYTQKSLSLSPGK

SEQ ID NO: 2176 - protein, 214 aa, Artificial Sequence
  Description of Artificial Sequence: Synthetic polypeptide
DIQMTQSPSSLSASLGDRVSLTCRASHEISGYLSWLQQKPDGTFKRLIYAASTLDSGVPKRFSGSRSGSDYSLSISSLESEDFADYYCLQYSSYPYTFGSGTKLEMKRTVAAPSVFIFPPSDEQLKSGTASVVCLLNNFYPREAKVQWKVDNALQSGNSQESVTEQDSKDSTYSLSSTLTLSKADYEKHKVYACEVTHQGLSSPVTKSFNRGEC

SEQ ID NO: 2177 - protein, 161 aa, Artificial Sequence
  Description of Artificial Sequence: Synthetic polypeptide
SQFRVSPLDRTWNLGETVELKCQVLLSNPTSGCSWLFQPRGAAASPTFLLYLSQNKPKAAEGLDTQRFSGKRLGDTFVLTLSDFRRENEGYYFCSALSNSIMYFSHFVPVFLPAKPTTTPAPRPPTPAPTIASQPLSLRPEACRPAAGGAVHTRGLDFACD

SEQ ID NO: 2178 - protein, 152 aa, Artificial Sequence
  Description of Artificial Sequence: Synthetic polypeptide
NSVLQQTPAYIKVQTNKMVMLSCEAKISLSNMRIYWLRQRQAPSSDSHHEFLALWDSAKGTIHGEEVEQEKIAVFRDASRFILNLTSVKPEDSGIYFCMIVGSPELTFGKGTQLSVVDFLPTTAQPTKKSTLKKRVCRLPRPETQKGPLCSP

SEQ ID NO: 2179 - protein, 412 aa, Artificial Sequence
  Description of Artificial Sequence: Synthetic polypeptide
MAWVWTLLFLMAAAQSIQASQFRVSPLDRTWNLGETVELKCQVLLSNPTSGCSWLFQPRGAAASPTFLLYLSQNKPKAAEGLDTQRFSGKRLGDTFVLTLSDFRRENEGYYFCSALSNSIMYFSHFVPVFLPAKPTTTPAPRPPTPAPTIASQPLSLRPEACRPAAGGAVHTRGLDFACDEPKSCDKTHTCPPCPAPELLGGPSVFLFPPKPKDTLMISRTPEVTCVVVDVSHEDPEVKFNWYVDGVEVHNAKTKPREEQYNSTYRVVSVLTVLHQDWLNGKEYKCKVSNKALPAPIEKTISKAKGQPREPQVYTLPPSRDELTKNQVSLTCLVKGFYPSDIAVEWESNGQPENNYKTTPPVLDSDGSFFLYSKLTVDKSRWQQGNVFSCSVMHEALHNHYTQKSLSLSPGK

SEQ ID NO: 2180 - protein, 185 aa, Artificial Sequence
  Description of Artificial Sequence: Synthetic polypeptide
DGNEEMGGITQTPYKVSISGTTVILTCPQYPGSEILWQHNDKNIGGDEDDKNIGSDEDHLSLKEFSELEQSGYYVCYPRGSKPEDANFYLYLRARVCENCMEMDVMSVATIVIVDICITGGLLLLVYYWSKNRKAKAKPVTRGAGAGGRQRGQNKERPPPVPNPDYEPIRKGQRDLYSGLNQRRI

SEQ ID NO: 2181 - protein, 214 aa, Artificial Sequence
  Description of Artificial Sequence: Synthetic polypeptide
SQFRVSPLDRTWNLGETVELKCQVLLSNPTSGCSWLFQPRGAAASPTFLLYLSQNKPKAAEGLDTQRFSGKRLGDTFVLTLSDFRRENEGYYFCSALSNSIMYFSHFVPVFLPAKPTTTPAPRPPTPAPTIASQPLSLRPEACRPAAGGAVHTRGLDFACDIYIWAPLAGTCGVLLLSLVITLYCNHRNRRRVCKCPRPVVKSGDKPSLSARYV

SEQ ID NO: 2182 - protein, 189 aa, Artificial Sequence
  Description of Artificial Sequence: Synthetic polypeptide
LQQTPAYIKVQTNKMVMLSCEAKISLSNMRIYWLRQRQAPSSDSHHEFLALWDSAKGTIHGEEVEQEKIAVFRDASRFILNLTSVKPEDSGIYFCMIVGSPELTFGKGTQLSVVDFLPTTAQPTKKSTLKKRVCRLPRPETQKGPLCSPITLGLLVAGVLVLLVSLGVAIHLCCRRRRARLRFMKQFYK

SEQ ID NO: 2183 - protein, 19 aa, Homo sapiens
VPSTPPTPSPSTPPTPSPS

SEQ ID NO: 2184 - protein, 6 aa, Homo sapiens
VPPPPP

SEQ ID NO: 2185 - protein, 58 aa, Homo sapiens
ESPKAQASSVPTAQPQAEGSLAKATTAPATTRNTGRGGEEKKKEKEKEEQEERETKTP

SEQ ID NO: 2186 - protein, 15 aa, Homo sapiens
EPKSCDKTHTCPPCP

SEQ ID NO: 2187 - protein, 12 aa, Homo sapiens
ERKCCVECPPCP

SEQ ID NO: 2188 - protein, 62 aa, Homo sapiens
ELKTPLGDTTHTCPRCPEPKSCDTPPPCPRCPEPKSCDTPPPCPRCPEPKSCDTPPPCPRCP

SEQ ID NO: 2189 - protein, 12 aa, Homo sapiens
ESKYGPPCPSCP

SEQ ID NO: 2190 - protein, 12 aa, Homo sapiens
ESKYGPPCPPCP

SEQ ID NO: 2191 - protein, 4 aa, Artificial Sequence
  Description of Artificial Sequence: Synthetic peptide
CPPC

SEQ ID NO: 2192 - protein, 4 aa, Artificial Sequence
  Description of Artificial Sequence: Synthetic peptide
CPSC

SEQ ID NO: 2193 - protein, 4 aa, Artificial Sequence
  Description of Artificial Sequence: Synthetic peptide
CPRC

SEQ ID NO: 2194 - protein, 4 aa, Artificial Sequence
  Description of Artificial Sequence: Synthetic peptide
SPPC

SEQ ID NO: 2195 - protein, 4 aa, Artificial Sequence
  Description of Artificial Sequence: Synthetic peptide
CPPS

SEQ ID NO: 2196 - protein, 4 aa, Artificial Sequence
  Description of Artificial Sequence: Synthetic peptide
SPPS

SEQ ID NO: 2197 - protein, 8 aa, Artificial Sequence
  Description of Artificial Sequence: Synthetic peptide
DKTHTCAA

SEQ ID NO: 2198 - protein, 11 aa, Artificial Sequence
  Description of Artificial Sequence: Synthetic peptide
DKTHTCPPCPA

SEQ ID NO: 2199 - protein, 18 aa, Artificial Sequence
  Description of Artificial Sequence: Synthetic peptide
DKTHTCPPCPATCPPCPA

SEQ ID NO: 2200 - protein, 25 aa, Artificial Sequence
  Description of Artificial Sequence: Synthetic peptide
DKTHTCPPCPATCPPCPATCPPCPA

SEQ ID NO: 2201 - protein, 30 aa, Artificial Sequence
  Description of Artificial Sequence: Synthetic polypeptide
DKTHTCPPCPAGKPTLYNSLVMSDTAGTCY

SEQ ID NO: 2202 - protein, 31 aa, Artificial Sequence
  Description of Artificial Sequence: Synthetic polypeptide
DKTHTCPPCPAGKPTHVNVSVVMAEVDGTCY

SEQ ID NO: 2203 - protein, 15 aa, Artificial Sequence
  Description of Artificial Sequence: Synthetic peptide
DKTHTCCVECPPCPA

SEQ ID NO: 2204 - protein, 26 aa, Artificial Sequence
  Description of Artificial Sequence: Synthetic peptide
DKTHTCPRCPEPKSCDTPPPCPRCPA

SEQ ID NO: 2205 - protein, 11 aa, Artificial Sequence
  Description of Artificial Sequence: Synthetic peptide
DKTHTCPSCPA

SEQ ID NO: 2206 - protein, 5 aa, Artificial Sequence
  Description of Artificial Sequence: Synthetic peptide
ADAAP

SEQ ID NO: 2207 - protein, 11 aa, Artificial Sequence
  Description of Artificial Sequence: Synthetic peptide
ADAAPTVSIFP

SEQ ID NO: 2208 - protein, 12 aa, Artificial Sequence
  Description of Artificial Sequence: Synthetic peptide
ADAAPTVSIFPP

SEQ ID NO: 2209 - protein, 6 aa, Artificial Sequence
  Description of Artificial Sequence: Synthetic peptide
AKTTAP

SEQ ID NO: 2210 - protein, 13 aa, Artificial Sequence
  Description of Artificial Sequence: Synthetic peptide
AKTTAPSVYPLAP

SEQ ID NO: 2211 - protein, 17 aa, Artificial Sequence
  Description of Artificial Sequence: Synthetic peptide
AKTTPKLEEGEFSEARV

SEQ ID NO: 2212 - protein, 9 aa, Artificial Sequence
  Description of Artificial Sequence: Synthetic peptide
AKTTPKLGG

SEQ ID NO: 2213 - protein, 6 aa, Artificial Sequence
  Description of Artificial Sequence: Synthetic peptide
AKTTPP

SEQ ID NO: 2214 - protein, 13 aa, Artificial Sequence
  Description of Artificial Sequence: Synthetic peptide
AKTTPPSVTPLAP

SEQ ID NO: 2215 - protein, 6 aa, Artificial Sequence
  Description of Artificial Sequence: Synthetic peptide
ASTKGP

SEQ ID NO: 2216 - protein, 13 aa, Artificial Sequence
  Description of Artificial Sequence: Synthetic peptide
ASTKGPSVFPLAP

SEQ ID NO: 2217 - protein, 26 aa, Artificial Sequence
  Description of Artificial Sequence: Synthetic peptide
ASTKGPSVFPLAPASTKGPSVFPLAP

SEQ ID NO: 2218 - protein, 14 aa, Artificial Sequence
  Description of Artificial Sequence: Synthetic peptide
EGKSSGSGSESKST

SEQ ID NO: 2219 - protein, 15 aa, Artificial Sequence
  Description of Artificial Sequence: Synthetic peptide
GEGESGEGESGEGES

SEQ ID NO: 2220 - protein, 20 aa, Artificial Sequence
  Description of Artificial Sequence: Synthetic peptide
GEGESGEGESGEGESGEGES

SEQ ID NO: 2221 - protein, 15 aa, Artificial Sequence
  Description of Artificial Sequence: Synthetic peptide
GEGGSGEGGSGEGGS

SEQ ID NO: 2222 - protein, 15 aa, Artificial Sequence
  Description of Artificial Sequence: Synthetic peptide
GENKVEYAPALMALS

SEQ ID NO: 2223 - protein, 15 aa, Artificial Sequence
  Description of Artificial Sequence: Synthetic peptide
GGEGSGGEGSGGEGS

SEQ ID NO: 2224 - protein, 15 aa, Artificial Sequence
  Description of Artificial Sequence: Synthetic peptide
GGGESGGEGSGEGGS

SEQ ID NO: 2225 - protein, 15 aa, Artificial Sequence
  Description of Artificial Sequence: Synthetic peptide
GGGESGGGESGGGES

SEQ ID NO: 2226 - protein, 10 aa, Artificial Sequence
  Description of Artificial Sequence: Synthetic peptide
GGGGSGGGGS

SEQ ID NO: 2227 - protein, 15 aa, Artificial Sequence
  Description of Artificial Sequence: Synthetic peptide
GGGGSGGGGSGGGGS

SEQ ID NO: 2228 - protein, 20 aa, Artificial Sequence
  Description of Artificial Sequence: Synthetic peptide
GGGGSGGGGSGGGGSGGGGS

SEQ ID NO: 2229 - protein, 15 aa, Artificial Sequence
  Description of Artificial Sequence: Synthetic peptide
GGGKSGGGKSGGGKS

SEQ ID NO: 2230 - protein, 15 aa, Artificial Sequence
  Description of Artificial Sequence: Synthetic peptide
GGGKSGGKGSGKGGS

SEQ ID NO: 2231 - protein, 15 aa, Artificial Sequence
  Description of Artificial Sequence: Synthetic peptide
GGKGSGGKGSGGKGS

SEQ ID NO: 2232 - protein, 5 aa, Artificial Sequence
  Description of Artificial Sequence: Synthetic peptide
GGSGG

SEQ ID NO: 2233 - protein, 13 aa, Artificial Sequence
  Description of Artificial Sequence: Synthetic peptide
GGSGGGGSGGGGS

SEQ ID NO: 2234 - protein, 15 aa, Artificial Sequence
  Description of Artificial Sequence: Synthetic peptide
GHEAAAVMQVQYPAS

SEQ ID NO: 2235 - protein, 15 aa, Artificial Sequence
  Description of Artificial Sequence: Synthetic peptide
GKGGSGKGGSGKGGS

SEQ ID NO: 2236 - protein, 15 aa, Artificial Sequence
  Description of Artificial Sequence: Synthetic peptide
GKGKSGKGKSGKGKS

SEQ ID NO: 2237 - protein, 20 aa, Artificial Sequence
  Description of Artificial Sequence: Synthetic peptide
GKGKSGKGKSGKGKSGKGKS

SEQ ID NO: 2238 - protein, 15 aa, Artificial Sequence
  Description of Artificial Sequence: Synthetic peptide
GKPGSGKPGSGKPGS

SEQ ID NO: 2239 - protein, 20 aa, Artificial Sequence
  Description of Artificial Sequence: Synthetic peptide
GKPGSGKPGSGKPGSGKPGS

SEQ ID NO: 2240 - protein, 15 aa, Artificial Sequence
  Description of Artificial Sequence: Synthetic peptide
GPAKELTPLKEAKVS

SEQ ID NO: 2241 - protein, 12 aa, Artificial Sequence
  Description of Artificial Sequence: Synthetic peptide
GSAGSAAGSGEF

SEQ ID NO: 2242 - protein, 14 aa, Artificial Sequence
  Description of Artificial Sequence: Synthetic peptide
IRPRAIGGSKPRVA

SEQ ID NO: 2243 - protein, 18 aa, Artificial Sequence
  Description of Artificial Sequence: Synthetic peptide
KESGSVSSEQLAQFRSLD

SEQ ID NO: 2244 - protein, 15 aa, Artificial Sequence
  Description of Artificial Sequence: Synthetic peptide
KTTPKLEEGEFSEAR

SEQ ID NO: 2245 - protein, 6 aa, Artificial Sequence
  Description of Artificial Sequence: Synthetic peptide
QPKAAP

SEQ ID NO: 2246 - protein, 13 aa, Artificial Sequence
  Description of Artificial Sequence: Synthetic peptide
QPKAAPSVTLFPP

SEQ ID NO: 2247 - protein, 12 aa, Artificial Sequence
  Description of Artificial Sequence: Synthetic peptide
RADAAAAGGPGS

SEQ ID NO: 2248 - protein, 6 aa, Artificial Sequence
  Description of Artificial Sequence: Synthetic peptide
RADAAP

SEQ ID NO: 2249 - protein, 9 aa, Artificial Sequence
  Description of Artificial Sequence: Synthetic peptide
RADAAPTVS

SEQ ID NO: 2250 - protein, 6 aa, Artificial Sequence
  Description of Artificial Sequence: Synthetic peptide
SAKTTP

SEQ ID NO: 2251 - protein, 18 aa, Artificial Sequence
  Description of Artificial Sequence: Synthetic peptide
SAKTTPKLEEGEFSEARV

SEQ ID NO: 2252 - protein, 10 aa, Artificial Sequence
  Description of Artificial Sequence: Synthetic peptide
SAKTTPKLGG

SEQ ID NO: 2253 - protein, 14 aa, Artificial Sequence
  Description of Artificial Sequence: Synthetic peptide
STAGDTHLGGEDFD

SEQ ID NO: 2254 - protein, 5 aa, Artificial Sequence
  Description of Artificial Sequence: Synthetic peptide
TVAAP

SEQ ID NO: 2255 - protein, 12 aa, Artificial Sequence
  Description of Artificial Sequence: Synthetic peptide
TVAAPSVFIFPP

SEQ ID NO: 2256 - protein, 24 aa, Artificial Sequence
  Description of Artificial Sequence: Synthetic peptide
TVAAPSVFIFPPTVAAPSVFIFPP

SEQ ID NO: 2257 - protein, 27 aa, Artificial Sequence
  Description of Artificial Sequence: Synthetic peptide
RADAAAAGGGGSGGGGSGGGGSGGGGS

SEQ ID NO: 2258 - protein, 20 aa, Artificial Sequence
  Description of Artificial Sequence: Synthetic peptide
GGSEGKSSGSGSESKSTGGS

SEQ ID NO: 2259 - protein, 8 aa, Artificial Sequence
  Description of Artificial Sequence: Synthetic peptide
GGGSGGGS

SEQ ID NO: 2260 - protein, 12 aa, Artificial Sequence
  Description of Artificial Sequence: Synthetic peptide
GGGSGGGSGGGS

SEQ ID NO: 2261 - protein, 16 aa, Artificial Sequence
  Description of Artificial Sequence: Synthetic peptide
GGGSGGGSGGGSGGGS

SEQ ID NO: 2262 - protein, 20 aa, Artificial Sequence
  Description of Artificial Sequence: Synthetic peptide
GGGSGGGSGGGSGGGSGGGS

SEQ ID NO: 2263 - protein, 15 aa, Artificial Sequence
  Description of Artificial Sequence: Synthetic peptide
GGGGSGGGGSGGGGS

SEQ ID NO: 2264 - protein, 20 aa, Artificial Sequence
  Description of Artificial Sequence: Synthetic peptide
GGGGSGGGGSGGGGSGGGGS

SEQ ID NO: 2265 - protein, 25 aa, Artificial Sequence
  Description of Artificial Sequence: Synthetic peptide
GGGGSGGGGSGGGGSGGGGSGGGGS

SEQ ID NO: 2266 - protein, 18 aa, Artificial Sequence
  Description of Artificial Sequence: Synthetic peptide
GSTSGSGKPGSGEGSTKG

SEQ ID NO: 2267 - protein, 14 aa, Artificial Sequence
  Description of Artificial Sequence: Synthetic peptide
IRPRAIGGSKPRVA

SEQ ID NO: 2268 - protein, 15 aa, Artificial Sequence
  Description of Artificial Sequence: Synthetic peptide
GKGGSGKGGSGKGGS

SEQ ID NO: 2269 - protein, 15 aa, Artificial Sequence
  Description of Artificial Sequence: Synthetic peptide
GGKGSGGKGSGGKGS

SEQ ID NO: 2270 - protein, 15 aa, Artificial Sequence
  Description of Artificial Sequence: Synthetic peptide
GGGKSGGGKSGGGKS

SEQ ID NO: 2271 - protein, 15 aa, Artificial Sequence
  Description of Artificial Sequence: Synthetic peptide
GKGKSGKGKSGKGKS

SEQ ID NO: 2272 - protein, 15 aa, Artificial Sequence
  Description of Artificial Sequence: Synthetic peptide
GGGKSGGKGSGKGGS

SEQ ID NO: 2273 - protein, 15 aa, Artificial Sequence
  Description of Artificial Sequence: Synthetic peptide
GKPGSGKPGSGKPGS

SEQ ID NO: 2274 - protein, 20 aa, Artificial Sequence
  Description of Artificial Sequence: Synthetic peptide
GKPGSGKPGSGKPGSGKPGS

SEQ ID NO: 2275 - protein, 20 aa, Artificial Sequence
  Description of Artificial Sequence: Synthetic peptide
GKGKSGKGKSGKGKSGKGKS

SEQ ID NO: 2276 - protein, 14 aa, Artificial Sequence
  Description of Artificial Sequence: Synthetic peptide
STAGDTHLGGEDFD

SEQ ID NO: 2277 - protein, 15 aa, Artificial Sequence
  Description of Artificial Sequence: Synthetic peptide
GEGGSGEGGSGEGGS

SEQ ID NO: 2278 - protein, 15 aa, Artificial Sequence
  Description of Artificial Sequence: Synthetic peptide
GGEGSGGEGSGGEGS

SEQ ID NO: 2279 - protein, 15 aa, Artificial Sequence
  Description of Artificial Sequence: Synthetic peptide
GEGESGEGESGEGES

SEQ ID NO: 2280 - protein, 15 aa, Artificial Sequence
  Description of Artificial Sequence: Synthetic peptide
GGGESGGEGSGEGGS

SEQ ID NO: 2281 - protein, 20 aa, Artificial Sequence
  Description of Artificial Sequence: Synthetic peptide
GEGESGEGESGEGESGEGES

SEQ ID NO: 2282 - protein, 18 aa, Artificial Sequence
  Description of Artificial Sequence: Synthetic peptide
GSTSGSGKPGSGEGSTKG

SEQ ID NO: 2283 - protein, 19 aa, Artificial Sequence
  Description of Artificial Sequence: Synthetic peptide
PRGASKSGSASQTGSAPGS

SEQ ID NO: 2284 - protein, 19 aa, Artificial Sequence
  Description of Artificial Sequence: Synthetic peptide
GTAAAGAGAAGGAAAGAAG

SEQ ID NO: 2285 - protein, 19 aa, Artificial Sequence
  Description of Artificial Sequence: Synthetic peptide
GTSGSSGSGSGGSGSGGGG

SEQ ID NO: 2286 - protein, 20 aa, Artificial Sequence
  Description of Artificial Sequence: Synthetic peptide
GKPGSGKPGSGKPGSGKPGS

SEQ ID NO: 2287 - protein, 4 aa, Artificial Sequence
  Description of Artificial Sequence: Synthetic peptide
GSGS

SEQ ID NO: 2288 - protein, 10 aa, Artificial Sequence
  Description of Artificial Sequence: Synthetic peptide
APAPAPAPAP

SEQ ID NO: 2289 - protein, 20 aa, Artificial Sequence
  Description of Artificial Sequence: Synthetic peptide
APAPAPAPAPAPAPAPAPAP

SEQ ID NO: 2290 - protein, 32 aa, Artificial Sequence
  Description of Artificial Sequence: Synthetic polypeptide
AEAAAKEAAAKEAAAAKEAAAAKEAAAAKAAA

SEQ ID NO: 2291 - protein, 7 aa, Artificial Sequence
  Description of Artificial Sequence: Synthetic peptide
NNNAAWS

SEQ ID NO: 2292 - protein, 18 aa, Artificial Sequence
  Description of Artificial Sequence: Synthetic peptide
RTYYRSKWLYDYAVSVKS

SEQ ID NO: 2293 - protein, 8 aa, Artificial Sequence
  Description of Artificial Sequence: Synthetic peptide
GYSSSFDY

SEQ ID NO: 2294 - protein, 14 aa, Artificial Sequence
  Description of Artificial Sequence: Synthetic peptide
TGTSSNIGTYKFVS

SEQ ID NO: 2295 - protein, 7 aa, Artificial Sequence
  Description of Artificial Sequence: Synthetic peptide
EVSKRPS

SEQ ID NO: 2296 - protein, 10 aa, Artificial Sequence
  Description of Artificial Sequence: Synthetic peptide
VSYAGSGTLL

SEQ ID NO: 2297 - protein, 120 aa, Artificial Sequence
  Description of Artificial Sequence: Synthetic polypeptide
QVQLQQSGPGLVKPSQTLSLTCAISGDSVFNNNAAWSWIRQSPSRGLEWLGRTYYRSKWLYDYAVSVKSRITINPDTSKNQFSLQLNSVTPEDTAVYYCARGYSSSFDYWGQGTLVTVSS

SEQ ID NO: 2298 - protein, 110 aa, Artificial Sequence
  Description of Artificial Sequence: Synthetic polypeptide
QSALTQPASVSGSPGQSITISCTGTSSNIGTYKFVSWYQQHPGKAPKVMIYEVSKRPSGVSNRFSGSKSGNTASLTISGLQAEDEADYYCVSYAGSGTLLFGGGTKLTVL

SEQ ID NO: 2299 - protein, 5 aa, Artificial Sequence
  Description of Artificial Sequence: Synthetic peptide
TYAMN

SEQ ID NO: 2300 - protein, 19 aa, Artificial Sequence
  Description of Artificial Sequence: Synthetic peptide
RIRSKYNNYATYYAASVKG

SEQ ID NO: 2301 - protein, 14 aa, Artificial Sequence
  Description of Artificial Sequence: Synthetic peptide
HGNFGNSYVSWFAY

SEQ ID NO: 2302 - protein, 14 aa, Artificial Sequence
  Description of Artificial Sequence: Synthetic peptide
RSSTGAVTTSNYAN

SEQ ID NO: 2303 - protein, 7 aa, Artificial Sequence
  Description of Artificial Sequence: Synthetic peptide
GTNKRAP

SEQ ID NO: 2304 - protein, 9 aa, Artificial Sequence
  Description of Artificial Sequence: Synthetic peptide
ALWYSNLWV

SEQ ID NO: 2305 - protein, 125 aa, Artificial Sequence
  Description of Artificial Sequence: Synthetic polypeptide
EVQLVESGGGLVQPGGSLRLSCAASGFTFNTYAMNWVRQAPGKGLEWVARIRSKYNNYATYYAASVKGRFTISRDDSKNSLYLQMNSLKTEDTAVYYCARHGNFGNSYVSWFAYWGQGTLVTVSS

SEQ ID NO: 2306 - protein, 109 aa, Artificial Sequence
  Description of Artificial Sequence: Synthetic polypeptide
QTVVTQEPSLTVSPGGTVTLTCRSSTGAVTTSNYANWVQQKPGQAPRGLIGGTNKRAPGTPARFSGSLLGGKAALTLSGVQPEDEAEYYCALWYSNLWVFGGGTKLTVL

SEQ ID NO: 2307 - protein, 5 aa, Artificial Sequence
  Description of Artificial Sequence: Synthetic peptide
DTYIH

SEQ ID NO: 2308 - protein, 17 aa, Artificial Sequence
  Description of Artificial Sequence: Synthetic peptide
RIDPANDNTLYASKFQG

SEQ ID NO: 2309 - protein, 9 aa, Artificial Sequence
  Description of Artificial Sequence: Synthetic peptide
GYGYYVFDH

SEQ ID NO: 2310 - protein, 11 aa, Artificial Sequence
  Description of Artificial Sequence: Synthetic peptide
RTSRSISQYLA

SEQ ID NO: 2311 - protein, 5 aa, Artificial Sequence
  Description of Artificial Sequence: Synthetic peptide
SGSGS

SEQ ID NO: 2312 - protein, 9 aa, Artificial Sequence
  Description of Artificial Sequence: Synthetic peptide
QQHNENPLT

SEQ ID NO: 2313 - protein, 118 aa, Artificial Sequence
  Description of Artificial Sequence: Synthetic polypeptide
EVQLQQSGAELVKPGASVKLSCTASGFNIKDTYIHFVRQRPEQGLEWIGRIDPANDNTLYASKFQGKATITADTSSNTAYMHLCSLTSGDTAVYYCGRGYGYYVFDHWGQGTTLTVSS

SEQ ID NO: 2314 - protein, 107 aa, Artificial Sequence
  Description of Artificial Sequence: Synthetic polypeptide
DVQINQSPSFLAASPGETITINCRTSRSISQYLAWYQEKPGKTNKLLIYSGSTLQSGIPSRFSGSGSGTDFTLTISGLEPEDFAMYYCQQHNENPLTFGAGTKLELR

SEQ ID NO: 2315 - protein, 330 aa, Unknown [sequence omitted]

SEQ ID NO: 2316 - protein, 326 aa, Unknown
  Description of Unknown: wild-type IgG2 sequence
ASTKGPSVFPLAPCSRSTSESTAALGCLVKDYFPEPVTVSWNSGALTSGVHTFPAVLQSSGLYSLSSVVTVPSSNFGTQTYTCNVDHKPSNTKVDKTVERKCCVECPPCPAPPVAGPSVFLFPPKPKDTLMISRTPEVTCVVVDVSHEDPEVQFNWYVDGVEVHNAKTKPREEQFNSTFRVVSVLTVVHQDWLNGKEYKCKVSNKGLPAPIEKTISKTKGQPREPQVYTLPPSREEMTKNQVSLTCLVKGFYPSDISVEWESNGQPENNYKTTPPMLDSDGSFFLYSKLTVDKSRWQQGNVFSCSVMHEALHNHYTQKSLSLSPGK

SEQ ID NO: 2317 - protein, 327 aa, Unknown
  Description of Unknown: wild-type IgG4 sequence
ASTKGPSVFPLAPCSRSTSESTAALGCLVKDYFPEPVTVSWNSGALTSGVHTFPAVLQSSGLYSLSSVVTVPSSSLGTKTYTCNVDHKPSNTKVDKRVESKYGPPCPSCPAPEFLGGPSVFLFPPKPKDTLMISRTPEVTCVVVDVSQEDPEVQFNWYVDGVEVHNAKTKPREEQFNSTYRVVSVLTVLHQDWLNGKEYKCKVSNKGLPSSIEKTISKAKGQPREPQVYTLPPSQEEMTKNQVSLTCLVKGFYPSDIAVEWESNGQPENNYKTTPPVLDSDGSFFLYSRLTVDKSRWQEGNVFSCSVMHEALHNHYTQKSLSLSLGK

SEQ ID NO: 2318 - protein, 110 aa, Unknown
  Description of Unknown: wild-type IgG1 CH2 sequence
APELLGGPSVFLFPPKPKDTLMISRTPEVTCVVVDVSHEDPEVKFNWYVDGVEVHNAKTKPREEQYNSTYRVVSVLTVLHQDWLNGKEYKCKVSNKALPAPIEKTISKAK

SEQ ID NO: 2319 - protein, 107 aa, Unknown
  Description of Unknown: wild-type IgG1 CH3 sequence
GQPREPQVYTLPPSRDELTKNQVSLTCLVKGFYPSDIAVEWESNGQPENNYKTTPPVLDSDGSFFLYSKLTVDKSRWQQGNVFSCSVMHEALHNHYTQKSLSLSPGK

SEQ ID NO: 2320 - protein, 184 aa, Artificial Sequence
  Description of Artificial Sequence: Synthetic polypeptide
MLQMAGQCSQNEYFDSLLHACIPCQLRCSSNTPPLTCQRYCNASVTNSVKGTNAILWTCLGLSLIISLAVFVLMFLLRKINSEPLKDEFKNTGSGLLGMANIDLEKSRTGDEIILPRGLEYTVEECTCEDCIKSKPKVDSDHCFPLPAMEEGATILVTTKTNDYCKSLPAALSATEIEKSISAR

SEQ ID NO: 2321 - protein, 750 aa, Artificial Sequence
  Description of Artificial Sequence: Synthetic polypeptide
MWNLLHETDSAVATARRPRWLCAGALVLAGGFFLLGFLFGWFIKSSNEATNITPKHNMKAFLDELKAENIKKFLYNFTQIPHLAGTEQNFQLAKQIQSQWKEFGLDSVELAHYDVLLSYPNKTHPNYISIINEDGNEIFNTSLFEPPPPGYENVSDIVPPFSAFSPQGMPEGDLVYVNYARTEDFFKLERDMKINCSGKIVIARYGKVFRGNKVKNAQLAGAKGVILYSDPADYFAPGVKSYPDGWNLPGGGVQRGNILNLNGAGDPLTPGYPANEYAYRRGIAEAVGLPSIPVHPIGYYDAQKLLEKMGGSAPPDSSWRGSLKVPYNVGPGFTGNFSTQKVKMHIHSTNEVTRIYNVIGTLRGAVEPDRYVILGGHRDSWVFGGIDPQSGAAVVHEIVRSFGTLKKEGWRPRRTILFASWDAEEFGLLGSTEWAEENSRLLQERGVAYINADSSIEGNYTLRVDCTPLMYSLVHNLTKELKSPDEGFEGKSLYESWTKKSPSPEFSGMPRISKLGSGNDFEVFFQRLGIASGRARYTKNWETNKFSGYPLYHSVYETYELVEKFYDPMFKYHLTVAQVRGGMVFELANSIVLPFDCRDYAVVLRKYADKIYSISMKHPQEMKTYSVSFDSLFSAVKNFTEIASKFSERLQDFDKSNPIVLRMMNDQLMFLERAFIDPLGLPDRPFYRHVIYAPSSHNKYAGESFPGIYDALFDIESKVDPSKAWGEVKRQIYVAAFTVQAAAETLSEVA

SEQ ID NO: 2322 - protein, 6 aa, Artificial Sequence
  Description of Artificial Sequence: Synthetic 6xHis tag
HHHHHH

SEQ ID NO: 2323 - protein, 8 aa, Artificial Sequence
  Description of Artificial Sequence: Synthetic peptide
DYKDDDDK

1. An isolated molecule, comprising: a first antigen binding domain and a second antigen binding domain, wherein the first antigen binding domain specifically binds CD8 and the second antigen binding domain specifically binds a T cell receptor (TCR) complex.

2. The isolated molecule of claim 1, further comprising a third antigen binding domain that specifically binds a third antigen, wherein optionally the third antigen comprises an antigen expressed by an undesired cells.

3. (canceled)

4. The isolated molecule of claim 1, wherein the isolated molecule activates or recruits CD8⁺ cytotoxic T lymphocytes (CTLs) upon co-engagement of the TCR complex and CD8, wherein optionally the isolated molecule is unable to activate or recruit CD8⁺ CTLs in the absence of co-engagement of the TCR complex and CD8.

5. (canceled)

6. The isolated molecule of claim 1, wherein the first antigen binding domain specifically binds CD8 and the second antigen binding domain specifically binds the TCR complex with affinities that result in activation or recruitment of CD8⁺ CTLs only upon co-engagement of the TCR complex and CD8.

7. The isolated molecule of claim 1, wherein the first antigen binding domain, the second antigen binding domain or the third antigen binding domain comprises a scFv, a Fab, a Fab′, a F(ab′)₂, a Fd, a Fv, a domain antibody (dAb), a VHH, a heavy chain variable domain (VH), a light chain variable domain (VL), a non-antibody scaffold, or fragments thereof, wherein optionally the first antigen binding domain comprises the Fab, wherein optionally the second antigen binding domain comprises the scFv, and wherein optionally the third antigen binding domain comprises the scFv.

8.-10. (canceled)

11. The isolated molecule of claim 1, comprising:
(I) a) a first polypeptide comprising, from N- to C-terminus, the second antigen binding domain comprising the scFv, a VH that is capable of specifically binding CD8, a CH1 domain, a hinge, a CH2 domain and a CH3 domain;
b) a second polypeptide comprising, from N- to C-terminus, a VL that is capable of specifically binding CD8 and a CL domain; and
c) a third polypeptide comprising, from N- to C-terminus, the third antigen binding domain comprising the scFv and a Fc or a fragment of the Fc; or
(II) a) a first polypeptide comprising, from N- to C-terminus, a VH that is capable of specifically binding CD8, a CH1 domain, a hinge, a CH2 domain and a CH3 domain;
b) a second polypeptide comprising, from N- to C-terminus, a VL that is capable of specifically binding CD8, a CL domain and the second antigen binding domain comprising the scFv; and
c) a third polypeptide comprising, from N- to C-terminus, the third antigen binding domain comprising the scFv and a Fc or a fragment of the Fc; or
(III) a) a first polypeptide comprising, from N- to C-terminus, a VH that is capable of specifically binding CD8, a CH1 domain, a hinge, a CH2 domain, a CH3 domain and the second antigen binding domain comprising the scFv;
b) a second polypeptide comprising, from N- to C-terminus, a VL that is capable of specifically binding CD8 and a CL domain; and
c) a third polypeptide comprising, from N- to C-terminus, the third antigen binding domain comprising the scFv and a Fc or a fragment of the Fc.

12.-13. (canceled)

14. The isolated molecule of claim 11, wherein the first antigen binding domain comprising the Fab, the second antigen binding domain comprising the scFv or the third antigen binding domain comprising the scFv is conjugated to the Fc or the fragment of the Fc, to the VH that is capable of specifically biding CD8, to the CL domain or to the CH3 domain via a linker, wherein optionally the linker comprises a polypeptide of SEQ ID NOs: 2183-2290.

15. (canceled)

16. The isolated molecule of claim 11, wherein the fragment of the Fc comprises a CH2 domain and a CH3 domain, wherein optionally the CH2 domain or the CH3 domain is an IgG1, IgG2, IgG3 or IgG4 isotype.

17. The isolated molecule of claim 16, wherein the CH3 domain comprises one or more substitutions when compared to a wild-type CH3 domain, wherein optionally
a) the first polypeptide comprises a CH3 domain comprising one or more substitutions when compared to a wild-type CH3 domain which promote heterodimerization of the first polypeptide with the third polypeptide,
b) the third polypeptide comprises a CH3 domain comprising one or more substitutions when compared to the wild-type CH3 domain which promote heterodimerization of the third polypeptide with the first polypeptide, or
c) the first polypeptide comprises the CH3 domain comprising one or more substitutions when compared to the wild-type CH3 which promote heterodimerization of the first polypeptide with the third polypeptide and the third polypeptide comprises the CH3 domain comprising one or more substitutions when compared to the wild-type CH3 which promote heterodimerization of the third polypeptide with the first polypeptide,
wherein, optionally, the one or more substitutions comprise T350V, L351Y, F405A, Y407V, T366Y, T366W, F405W, T394W, T394S, Y407T, Y407A, T366S/L368A/Y407V, L351Y/F405A/Y407V, T366I/K392M/T394W, F405A/Y407V, T366L/K392M/T394W, L351Y/Y407A, T366A/K409F, L351Y/Y407A, T366V/K409F, T366A/K409F, T350V/L351Y/F405A/Y407V or T350V/T366L/K392L/T394W, wherein residue numbering is according to the EU index.

18. (canceled)

19. The isolated molecule of claim 1, comprising: a first polypeptide, a second polypeptide and a third polypeptide, wherein:
(I) a) the first polypeptide comprises, from N- to C-terminus, a second antigen binding domain comprising a scFv that specifically binds a TCR complex, a VH that is capable of specifically binding CD8, a CH1 domain, a hinge, a CH2 domain and a CH3 domain;
b) the second polypeptide comprises, from N- to C-terminus, a VL that is capable of specifically binding CD8 and a CL domain; and
c) the third polypeptide comprises, from N- to C-terminus, a third antigen binding domain comprising a scFv that specifically binds an antigen expressed by an undesired cell and a Fc or a fragment of the Fc; or
(II) a) the first polypeptide comprises, from N- to C-terminus, a VH that is capable of specifically binding CD8, a CH1 domain, a hinge, a CH2 domain and a CH3 domain;
b) the second polypeptide comprises, from N- to C-terminus, a VL that is capable of specifically binding CD8, a CL domain and a second antigen binding domain comprising a scFv that specifically binds a TCR complex; and
c) the third polypeptide comprises, from N- to C-terminus, a third antigen binding domain comprising a scFv that specifically binds an antigen expressed by an undesired cell and a Fc or a fragment of the Fc; or
(III) a) the first polypeptide comprises, from N- to C-terminus, a VH that is capable of specifically CD8, a CH1 domain, a hinge, a CH2 domain, a CH3 domain and a second antigen binding domain comprising a scFv that specifically binds a TCR complex;
b) the second polypeptide comprises, from N- to C-terminus, a VL that is capable of specifically binding CD8 and a CL domain; and
c) the third polypeptide comprises, from N- to C-terminus, a third antigen binding domain comprising a scFv that specifically binds an antigen expressed by an undesired cell and a Fc or a fragment of the Fc.

20.-21. (canceled)

22. The isolated molecule of claim 19, wherein the first antigen binding domain comprising the Fab, the second antigen binding domain comprising the scFv or the third antigen binding domain comprising the scFv is conjugated to the Fc or the fragment of the Fc, to the VH that is capable of specifically biding CD8, to the CL domain or to the CH3 domain via a linker, wherein optionally the linker comprises a polypeptide of SEQ ID NOs: 2183-2290.

23. (canceled)

24. The isolated molecule of claim 19, wherein
a) the first polypeptide comprises a CH3 domain comprising one or more substitutions when compared to a wild-type CH3 domain which promote heterodimerization of the first polypeptide with the third polypeptide;
b) the third polypeptide comprises a CH3 domain comprising one or more substitutions when compared to the wild-type CH3 domain which promote heterodimerization of the third polypeptide with the first polypeptide; or
c) the first polypeptide comprises the CH3 domain comprising one or more substitutions when compared to the wild-type CH3 which promote heterodimerization of the first polypeptide with the third polypeptide and the third polypeptide comprises the CH3 domain comprising one or more substitutions when compared to the wild-type CH3 which promote heterodimerization of the third polypeptide with the first polypeptide,
wherein, optionally, the one or more substitutions comprise T350V, L351Y, F405A, Y407V, T366Y, T366W, F405W, T394W, T394S, Y407T, Y407A, T366S/L368A/Y407V, L351Y/F405A/Y407V, T366I/K392M/T394W, F405A/Y407V, T366L/K392M/T394W, L351Y/Y407A, T366A/K409F, L351Y/Y407A, T366V/K409F, T366A/K409F, T350V/L351Y/F405A/Y407V or T350V/T366L/K392L/T394W, wherein residue numbering is according to the EU index.

25. (canceled)

26. The isolated molecule of claim 19, wherein the Fc, the CH2 domain or the CH3 domain is an IgG1, IgG2, IgG3 or IgG4 isotype.

27. The isolated molecule of claim 1, wherein the second antigen binding domain specifically binds CD3, TCRα chain, TCRβ chain, TCRγ chain or TCR chain, or any combination thereof.

28. The isolated molecule of claim 27, wherein the TCRβ chain comprises TCRVB17.

29. The isolated molecule of claim 27, wherein CD3 comprises CD3ε, CD3γ, CD3δ or CD3.

30. The isolated molecule of claim 29, wherein the second antigen binding domain that specifically binds CD3 comprises a heavy chain complementarity determining region 1 (HCDR1 of SEQ ID NO: 2291, a HCDR2 of SEQ ID NO: 2292, a HCDR3 of SEQ ID NO: 2293, a LCDR1 of SEQ ID NO: 2294, a LCDR2 of SEQ ID NO: 2295 and a LCDR3 of SEQ ID NO: 2296.

31. The isolated molecule of claim 30, wherein the second antigen binding domain that specifically binds CD3 comprises the VH of SEQ ID NO: 2297 and the VL of SEQ ID NO: 2298.

32. The isolated molecule of claim 1, wherein the first antigen binding domain comprises the HCDR1 of SEQ ID NO: 2307, the HCDR2 of SEQ ID NO: 2308, the HCDR3 of SEQ ID NO: 2309, the LCDR1 of SEQ ID NO: 2310, the LCDR2 of SEQ ID NO: 2311 and the LCDR3 of SEQ ID NO: 2312.

33. The isolated molecule of claim 1, wherein the first antigen binding domain comprises the VH of SEQ ID NO: 2313 and the VL of SEQ ID NO: 2314.

34. The isolated molecule of claim 1, wherein the undesired cell is a pathogenic cell, wherein optionally the undesired cell is a cancer cell, an infected cell, a virus infected cell, a bacterial infected cell, an immune cell, an inflamed cell, a damaged cells, a foreign cell, an apoptotic cell, a dysplastic cell, an immunogenic cell, a metaplastic cell or a mutant cell, or any combination thereof.

35. (canceled)

36. The isolated molecule of claim 1, wherein the isolated molecule is an antibody or a non-antibody molecule, wherein optionally the antibody comprises a first half molecule and a second half molecule, wherein optionally the first half molecule comprises the first antigen binding domain and the second antigen binding domain and the second half molecule comprises the third antigen binding domain.

37. (canceled)

38. The isolated molecule of claim 1, wherein the antigen expressed by the undesired cell comprises mesothelin, alpha-fetoprotein (ALP), BAGE, BCR-ABL, beta-catenin, beta-HCG, BrE3-antigen, BCA225, BCMA, BTAA, CA125, CA195, CA242, CA-50, CAM43, CAMEL, CAP-1, carbonic anhydrase IX, CA19-9, CA72-4, CAM 17.1, CASP-8, CCCL19, CCCL21, CD1, CD 1a, CD2, CD4, CD5, CD11A, CD14, CD15, CD16, CD18, CD19, CD20, CD21, CD22, CD23, CD25, CD29, CD30, CD32b, CD33, CD37, CD38, CD40, CD40L, CD44, CD45, CD46, CD47, CD52, CD54, CD55, CD59, CD64, CD66a-e, CD67, CD68, CD70, CD70L, CD74, CD79a, CD79b, CD80, CD83, CD95, CD123, CD126, CD132, CD133, CD138, CD147, CD154, CDC27, CDK4, CDK4m, CDKN2A, CO-029, CTLA4, CXCR4, CXCR7, CXCL12, HIF-1a, colon-specific antigen-p (CSAp), CEACAM5) CEACAM6, c-Met, DAM, E2A-PRL, EGFR, EGFRvIII, EGP-1, EGP-2, ELF2-M, Ep-CAM, FGF, FGF-5, Flt-1, Flt-3, folate receptor, G250 antigen, Ga733VEpCAM, GAGE, gplOO, GRO-b, H4-RET, HLA-DR, HM1.24, human chorionic gonadotropin (HCG) HER2, HER3, HMGB-1, HIF-1, HSP70-2M, HST-2, HTgp-175, la, IGF-1R, IFN-g, IFN-α, IFN-b, IFN-1, IL-4R, IL-6R, IL-13R, IL-15R, IL-17R, IL-18R, IL-2, IL-6, IL-8, IL-12, IL-15, IL-17, IL-18, IL-23, IL-25, insulin-like growth factor-1 (IGF-1), KC4-antigen, KLK2, KSA, KS-1-antigen, KS1-4, LAGE-1a, Le-Y, LDR/FUT, M344, MA-50, macrophage migration inhibitory factor (MIF), MAGE, MAGE-1, MAGE-3, MAGE-4, MAGE-5, MAGE-6, MART-1, MART-2, TRAG-3, MCP-1, MIP-1A, MIP-1B, MIF, MG7-Ag, MOV18, MUC1, MUC2, MUC3, MUC4, MUC5ac, MUC13, MUC16, MUM-1/2, MUM-3, MYL-RAR, NB/70K, Nm23H1, NuMA, NCA66, NCA95, NCA90, NY-ESO-1, p15, p16, p185erbB2, p180erbB3, PAM4 antigen, pancreatic cancer mucin, PD-1, PD-L1, PD-L2, PI5, placental growth factor, p53, PLAGL2, Pmel17 prostatic acid phosphatase, PSA, PRAME, PSMA, PlGF, ILGF, ILGF-1R, IL-6, IL-25, RCAS1, RS5, RAGE, RANTES, Ras, T101, SAGE, S100, SLAMF7, survivin, survivin-2B, SDDCAG16, TA-90\Mac2 binding protein, TAAL6, TAC, TAG-72, TLP, tenascin, TMEFF2, TRAIL receptors, TRP-1, TRP-2, TSP-180, VEGFR, ED-B fibronectin, WT-1, 17-1A-antigen, C3, C3a, C3b, C5a, C5, bcl-2, K-ras, tumor neoantigen, a viral antigen associated with cancer, FcγRIIB, IL-12β2R, CD28, CD56, CD11c, CD66b, CD41, CD61, CD62, CD235a, CD146, CD326, or CD203c.

39. A kit, comprising the isolated molecule of claim 1.

40. The kit of claim 39, further comprising means for diluting or administering the isolated molecule of claim 1.

41. A pharmaceutical composition, comprising the isolated molecule of claim 1 and a pharmaceutically acceptable excipient.

42. A method of selectively activating or recruiting CD8⁺ CTLs towards an undesired cell, comprising: contacting a population of lymphocytes with an isolated molecule of claim 1, wherein optionally the selective activation or recruitment of CD8⁺ CTLs comprises in vitro selective activation or recruitment of CD8⁺ CTLs; wherein optionally the selective activation or recruitment of CD8⁺ CTLs comprises ex vivo selective activation or recruitment of CD8⁺ CTLs; wherein optionally the selective activation or recruitment of CD8⁺ CTLs comprises in vivo selective activation or recruitment of CD8⁺ CTLs.

43.-45. (canceled)

46. A method of selectively activating or recruiting CD8⁺ CTLs towards an undesired cell in a subject, or providing an improved T cell redirection therapy for a subject in need thereof, or targeting CD8+ CTLs to an undesired cell in a subject, or treating a cancer in a subject, or enhancing a CD8⁺ CTL response against an undesired cell in a subject, comprising administering to the subject an isolated molecule of claim 1.

47.-50. (canceled)

51. The method of claim 46, wherein the subject has a cancer, an infection, or an immune-mediated disease,
wherein optionally the cancer is a hematological malignancy or a solid tumor, wherein optionally the hematological malignancy comprises acute lymphoblastic leukemia, acute myeloid leukemia, anaplastic large-cell lymphoma, Burkitt's lymphoma, chronic lymphocytic leukemia, chronic myeloid leukemia, diffuse large B-cell lymphoma, dendritic cell neoplasm, follicular lymphoma, hairy cell leukemia, Hodgkin's lymphoma, leukemia, B cell leukemia, T cell leukemia, light chain amyloidosis, lymphoma, B cell lymphoma, NK cell lymphoma, T cell lymphoma, mantle-cell lymphoma, marginal zone B-cell lymphoma, monoclonal gammopathy of undetermined significance, mucosa-associated lymphatic tissue lymphoma, multiple myeloma, myelodysplastic syndrome, non-Hodgkin's lymphoma, plasma cell leukemia, precursor B-cell lymphoblastic leukemia, smoldering multiple myeloma, Waldenstrom's macroglobulinemia, B cell malignancy, T cell malignancy, NK cell malignancy, or any combination thereof;
wherein optionally the cancer is a solid tumor cancer, wherein optionally the solid tumor cancer comprises adenocarcinoma, anal cancer, basal cell carcinoma, biliary tract cancer, bladder cancer, bone cancer, breast cancer, cancer associated with infection, cancer of the adrenal gland, cancer of the endocrine system, cancer of the head or neck, cancer of the parathyroid gland, cancer of the penis, cancer of the thyroid gland, cancer of the urethra, cervical cancer, carcinoma of the breast, carcinoma of the fallopian tubes, carcinoma of the liver, carcinoma of the lung, carcinoma of the prostate, carcinoma of the renal pelvis, carcinoma of the vagina, carcinoma of the vulva, choriocarcinoma, clear cell carcinoma, colon cancer, colon carcinoma, colorectal cancer, connective tissue cancer, cutaneous or intraocular malignant melanoma, environmentally induced cancer, gastric cancer, gastrointestinal cancer, glioma, glioblastoma, endometrial cancer, epithelial cancer, esophageal cancer, eye cancer, larynx cancer, liver cancer, hepatocellular carcinoma, hormone refractory prostate adenocarcinoma, Kaposi's sarcoma, kidney cancer, lung cancer gastro-esophageal cancer, melanoma, mesothelioma, Merkel cell cancer, neuroblastoma, non-small cell lung cancer (NSCLC), osteosarcoma, ovarian cancer, pancreatic cancer, prostate cancer, rectal cancer, renal cell carcinoma, retinoblastoma rhabdomyosarcoma, squamous cell cancer, soft tissue sarcoma, solid tumors of childhood, spinal axis tumor, stomach cancer, testicular cancer, thyroid cancer, uterine cancer, urothelial carcinoma or sarcomas, or any combination thereof;
wherein optionally the infection comprises infection with adenovirus, arboviral encephalitis virus, coronavirus, coxsackie virus, cytomegalovirus (CMV), dengue virus, echovirus, Epstein Barr virus, flaviviruses, human immunodeficiency virus (HIV), hepatitis A virus, hepatitis B virus, hepatitis C virus, herpes virus, HTLV virus, influenza virus, JC virus, measles virus, molluscum virus, mumps virus, papillomavirus, parvovirus, poliovirus, rabies virus, respiratory syncytial virus, rhinovirus, rotavirus, rubella virus or vaccinia virus, bacteria, virus, fungi, protozoa, parasite or prion, or any combination thereof; and
wherein optionally the immune-mediated disease comprises systemic lupus erythematosus (SLE), ankylosing spondylitis, Chagas disease, chronic obstructive pulmonary disease, Crohn's Disease, dermatomyositis, diabetes mellitus type 1, endometriosis, Goodpasture's syndrome, Graves' disease, Guillain-Barre syndrome (GBS), Hashimoto's disease, hidradenitis suppurativa, Kawasaki disease, IgA nephropathy, idiopathic thrombocytopenic purpura, interstitial cystitis, mixed connective tissue disease, morphea, multiple sclerosis, myasthenia gravis, narcolepsy, neuromyotonia, pemphigus vulgaris, pernicious anaemia, psoriasis, psoriatic arthritis, polymyositis, primary biliary cirrhosis, relapsing polychondritis, rheumatoid arthritis (RA), sarcoidosis, schizophrenia, scleroderma, Sjogren's syndrome, temporal arteritis, ulcerative colitis, vasculitis, vitiligo, Wegener's granulomatosis, IgG4-related disease, anti-synthetase syndrome, and autoimmunity associated with immunodeficiency including chronic variable immunodeficiency, Wiskott-Aldrich syndrome, Good syndrome, IgA deficiency, Hyper IgM syndrome, complement disorders, seropositive RA, SLE, postmyocardial infarction syndrome, subacute bacterial endocarditis, anti-glomerular basement membrane nephritis, autoimmune hepatitis, primary biliary cirrhosis, alopecia areata, bullous pemphigoid, cicatricial pemphigoid, dermatitis herpetiformis, gestational pemphigoid, pemphigus vulgaris, systemic scleroderma, Addison's disease, autoimmune polyendocrine syndrome type 2, autoimmune pancreatitis, diabetes mellitus type 1, autoimmune thyroiditis, Graves' disease, Sjogren's syndrome, celiac disease, antiphospholipid syndrome, autoimmune thrombocytopenic purpura, cold agglutinin disease, pernicious anemia, thrombocytopenia, adult onset Still's disease, CREST syndrome, drug-induced lupus, enthesitis-related arthritis, juvenile arthritis, mixed connective tissue disease, palindromic rheumatism, Parry Romberg syndrome, rheumatic fever, undifferentiated connective tissue disease, dermatomysitis, myasthenia gravis, neuromyotonia, paraneoplastic cerebellar degeneration, polymyositis, Bickerstaff s encephalitis, chronic inflammatory demyelinating polyneuropathy, Guillain-Barre syndrome, Hashimoto's encephalopathy, Lambert-Eaton myasthenic syndrome, multiple sclerosis, progressive inflammatory neuropathy, Stiff person syndrome, autoimmune uveitis, neuromyelitis optica, symphathetic ophthalmia, Meniere's disease, anti-neutrophil cytoplasmic antibody-associated vasculitis, Churg-Strauss syndrome, Henoch-Schonlein purpura, microscopic polyangiitis, urticarial vasculitis, and vasculitis. Examples of autoantibody-associated autoimmune conditions include gastritis and POEMS syndrome. Examples of autoantibody-associated (non-autoimmune) diseases include agammaglobulinemia, amyotrophic lateral sclerosis, Castleman's disease, cutaneous leukocytoclastic angiitis, eczema, eosinophilic gastroenteritis, erythroblastosis fetalis, fibrodysplasia ossificans progressive, hypogammaglobulinemia, idiopathic pulmonary fibrosis, IgA nephropathy, Majeed syndrome, narcolepsy, Rasmussen's encephalitis, spondyloarthropathy or Sweet's syndrome, or any combination thereof.

52.-56. (canceled)

57. A system comprising a means for selective activation or recruitment of CD8⁺ CTLs.

58. A composition comprising an antibody comprising a first antigen binding domain and a second antigen binding domain, and means of claim 57.

59. A composition for enhancing an immune response against an antigen expressed by an undesired cell, comprising means of claim 57.

60. A composition for treating a cancer in subject, comprising means of claim 57.

61. A system comprising a means for providing an improved T cell redirecting therapeutic treatment to a subject.

62. The system of claim 61, wherein the T cell redirecting therapeutic treatment comprises administration of an isolated molecule of claim 1.

63. The system of claim 61, wherein the T cell redirecting therapeutic comprising a means for improving safety of the T cell redirecting therapeutic.

64. A process for generating an improved T cell redirecting therapeutic, comprising:
a) a step for performing a function of designing the T cell redirecting therapeutic comprising the means of claim 61; and
b) a step for performing a function of producing the T cell redirecting therapeutic comprising the means of claim 61.

65. A method of isolating, separating, purifying, sorting, selecting or capturing a CD8+ CTL comprising:
a) providing a sample comprising the CD8+ CTL;
b) contacting the sample with an isolated molecule of claim 1; and
c) isolating, separating, purifying, sorting, selecting or capturing the CD8⁺ CTL bound to the isolated molecule;
wherein optionally, the sample is a blood sample or a tissue sample.

66. (canceled)

67. The method of claim 65, wherein the method is conducted in suspension or on a solid support.

68. The method of claim 65, wherein the method is conducted using particles, microfluidics, fluorescent cell sorting, chips, columns or surfaces.
